(19) United States
(12) Patent Application Publication
(10) Pub. No.: US 2021/0163944 A1
(43) Pub. Date: Jun. 3, 2021

(54) NOVEL CAS12B ENZYMES AND SYSTEMS

(71) Applicants: THE BROAD INSTITUTE, INC., Cambridge, MA (US); MASSACHUSETTS INSTITUTE OF TECHNOLOGY, Cambridge, MA (US)

(72) Inventors: Feng Zhang, Cambridge, MA (US); Jonathan Strecker, Cambridge, MA (US); Ian Slaymaker, Cambridge, MA (US); Sara Jones, Cambridge, MA (US)

(73) Assignees: THE BROAD INSTITUTE, INC., Cambridge, MA (US); MASSACHUSETTS INSTITUTE OF TECHNOLOGY, Cambridge, MA (US)

(21) Appl. No.: 17/265,910

(22) PCT Filed: Aug. 7, 2019
(86) PCT No.: PCT/US2019/045582

§ 371 Date: Feb. 4, 2021

Related U.S. Application Data
(60) Provisional application No. 62/715,640, filed on Aug. 7, 2018.
(60) Provisional application No. 62/744,080, filed on Oct. 10, 2018.
(60) Provisional application No. 62/751,196, filed on Oct. 26, 2018.
(60) Provisional application No. 62/794,929, filed on Jan. 21, 2019.
(60) Provisional application No. 62/831,028, filed on Apr. 8, 2019.

(51) Int. Cl. C12N 15/113; C12N 9/22; C07K 14/32

(52) U.S. Cl. CPC C12N 15/113; C12N 9/22; C12Y 304/22; C12N 2310/3519; C12Y 301/00; C07K 14/32

(57) ABSTRACT

The disclosure provides for systems, methods, and compositions for targeting nucleic acids. In particular, the invention provides non-naturally occurring or engineered RNA-targeting systems comprising a novel RNA-targeting Cas12b effector protein and at least one targeting nucleic acid component like a guide RNA or crRNA.

### CROSS-REFERENCE TO RELATED APPLICATIONS

[0001] This application claims the benefit of U.S. Provisional Application Nos. 62/715,640, filed Aug. 7, 2018, 62/744,080, filed Oct. 10, 2018, 62/751,196, filed Oct. 26, 2018, filed 62/794,929, filed Jan. 21, 2019, and 62/831,028, filed Apr. 8, 2019. The entire contents of the above-identified applications are hereby fully incorporated herein by reference.

### STATEMENT REGARDING FEDERALLY SPONSORED RESEARCH

[0002] This invention was made with government support under Grant Nos. NMI10049 and HL141201 awarded by the National Institutes of Health. The government has certain rights in the invention.

### REFERENCE TO AN ELECTRONIC SEQUENCE LISTING

[0003] The contents of the electronic sequence listing (“BROD-2670_ST25.txt”; Size is 879,558 bytes and it was created on Jul. 25, 2019) is herein incorporated by reference in its entirety.

### TECHNICAL FIELD

[0004] The subject matter disclosed herein generally relates to systems, methods and compositions related to Clustered Regularly Interspaced Short Palindromic Repeats (CRISPR) and components thereof. The present invention also generally relates to delivery of large payloads and includes novel delivery particles, particularly using lipid and viral particle, and also novel viral capsids, both suitable to deliver large payloads, such as Clustered Regularly Interspaced Short Palindromic Repeats (CRISPR), CRISPR protein (e.g., Cas, C2c1), CRISPR-Cas or CRISPR system or CRISPR-Cas complex, components thereof, nucleic acid molecules, e.g., vectors, involving the same and uses of all of the foregoing, amongst other aspects. Additionally, the present invention relates to methods for developing or designing CRISPR-Cas system based therapy or therapeutics.

### BACKGROUND

[0005] Recent advances in genome sequencing techniques and analysis methods have significantly accelerated the ability to catalog and map genetic factors associated with a diverse range of biological functions and diseases. Precise genome targeting technologies are needed to enable systematic reverse engineering of causal genetic variations by allowing selective perturbation of individual genetic elements, as well as to advance synthetic biology, biotechnological, and medical applications. Although genome-editing techniques such as designer zinc fingers, transcription activator-like effectors (TALEs), or homing meganucleases are available for producing targeted genome perturbations, there remains a need for new genome engineering technologies that employ novel strategies and molecular mechanisms and are affordable, easy to set up, scalable, and amenable to targeting multiple positions within the eukaryotic genome. This would provide a major resource for new applications in genome engineering and biotechnology.

[0006] The CRISPR-Cas systems of bacterial and archaeal adaptive immunity show extreme diversity of protein composition and genomic loci architecture. The CRISPR-Cas system loci have more than 50 gene families and there is no strictly universal genes indicating fast evolution and extreme diversity of loci architecture. So far, adopting a multi-pronged approach, there is comprehensive cas gene identification of about 395 profiles for 93 Cas proteins. Classification includes signature gene profiles plus signatures of locus architecture. A new classification of CRISPR-Cas systems is proposed in which these systems are broadly divided into two classes, Class 1 with multisubunit effector complexes and Class 2 with single-subunit effector modules exemplified by the Cas9 protein. Novel effector proteins associated with Class 2 CRISPR-Cas systems may be developed as powerful genome engineering tools and the prediction of putative novel effector proteins and their engineering and optimization is important. Novel Cas12b orthologues and uses thereof are desirable.

[0007] Citation or identification of any document in this application is not an admission that such document is available as prior art to the present invention.

### SUMMARY

[0008] In one aspect, the present disclosure provides a non-naturally occurring or engineered system comprising i) a Cas12b effector protein from Table 1 or 2, and ii) guide comprising a guide sequence capable of hybridizing to a target sequence. In some embodiments, the system further comprises a tracr RNA.

[0009] In some embodiments, the Cas12b effector protein originates from a bacterium selected from the group consisting of: Alicyclobacillus kakegawensis, Bacillus sp. V3-13, Bacillus hisashii, Lentisphaeria bacterium, and Laceyella sediminis. In some embodiments, the tracr RNA is fused to the crRNA at the 5′ end of the direct repeat. In some embodiments, the system comprises two or more crRNAs. In some embodiments, the guide sequence hybridizes to one or more target sequences in a prokaryotic cell. In some embodiments, the guide sequence hybridizes to one or more target sequences in a eukaryotic cell. In some embodiments, the Cas12b effector protein comprises one or more nuclear localization signals (NLSs). In some embodiments, the Cas12b effector protein is catalytically inactive. In some embodiments, the Cas12b effector protein is associated with one or more functional domains. In some embodiments, the one or more functional domains cleaves the one or more target sequences. In some embodiments, the functional domain modifies transcription or translation of the one or more target sequences. In some embodiments, the Cas12b effector protein is associated with one or more functional domains; and the Cas12b effector protein contains one or more mutations within a RuvC and/or Nuc domain, whereby the formed CRISPR complex is capable of delivering an epigenetic modifier or a transcriptional or translational activation or repression signal at or adjacent to a target sequence. In some embodiments, the Cas12b effector protein is associated with an adenosine deaminase or cytidine deaminase. In some embodiments, the system further comprises a recombination template. In some embodiments, the recombination template is inserted by homology-directed repair (HDR).

[0010] In another aspect, the present disclosure provides a Cas12b vector system, which comprises one or more vectors comprising: a first regulatory element operably linked to a nucleotide sequence encoding a Cas12b effector protein from Table 1 or 2, and i) a) a second regulatory element operably linked to a nucleotide sequence encoding the guide sequence, and b) a third regulatory element operably linked to a nucleotide sequence encoding the tracr RNA, or ii) a second regulatory element operably linked to a nucleotide sequence encoding the guide sequence and the tracr RNA.

[0011] In some embodiments, the nucleotide sequence encoding the Cas12b effector protein is codon optimized for expression in a eukaryotic cell. In some embodiments, the system is comprised in a single vector. In some embodiments, the one or more vectors comprise viral vectors. In some embodiments, the one or more vectors comprise one or more retroviral, lentiviral, adenoviral, adeno-associated or herpes simplex viral vectors.

[0012] In another aspect, the present disclosure provides a delivery system configured to deliver a Cas12b effector protein and one or more nucleic acid components of a non-naturally occurring or engineered composition comprising i) Cas12b effector protein from Table 1 or 2, ii) a 3′ guide sequence that is capable of hybridizing to a one or more target sequences, and iii) a tracr RNA.

[0013] In some embodiments, the delivery system comprises one or more vectors, or one or more polynucleotide molecules, the one or more vectors or polynucleotide molecules comprising one or more polynucleotide molecules encoding the Cas12b effector protein and one or more nucleic acid components of the non-naturally occurring or engineered composition. In some embodiments, the delivery system comprises a delivery vehicle comprising liposome(s), particle(s), exosome(s), microvesicle(s), a gene-gun, or viral vector(s).

[0014] In another aspect, the present disclosure provides a non-naturally occurring or engineered system herein, a vector system herein, or a delivery system herein, for use in a therapeutic method of treatment.

[0015] In another aspect, the present disclosure provides a method of modifying one or more target sequences of interest, the method comprising contacting one or more target sequences with one or more non-naturally occurring or engineered compositions comprising i) a Cas12b effector protein from Table 1 or 2, ii) a 3′ guide sequence that is capable of hybridizing to a target DNA sequence, and iii) a tracr RNA, whereby there is formed a CRISPR complex comprising the Cas12b effector protein complexed with the crRNA and the tracr RNA, wherein the guide sequence directs sequence-specific binding to the one or more target sequences in a cell, whereby expression of the one or more target sequences is modified. In some embodiments, modifying expression of the target gene comprises cleaving the one or more target sequences. In some embodiments, modifying expression of the target gene comprises increasing or decreasing expression of the one or more target sequences. In some embodiments, the composition further comprises a recombination template, and wherein modifying the one or more target sequences comprises insertion of the recombination template or a portion thereof. In some embodiments, the one or more target sequences is in a prokaryotic cell. In some embodiments, the one or more target sequences is in a eukaryotic cell.

[0016] In another aspect, the present disclosure provides a cell or progeny thereof comprising one or more modified target sequences, wherein the one or more target sequences has been modified according to the method herein, optionally a therapeutic T cell or antibody-producing B-cell or wherein said cell is a plant cell. In some embodiments, the cell is a prokaryotic cell. In some embodiments, the cell is a eukaryotic cell. In some embodiments, the modification of the one or more target sequences results in: the cell comprising altered expression of at least one gene product; the cell comprising altered expression of at least one gene product, wherein the expression of the at least one gene product is increased; the cell comprising altered expression of at least one gene product, wherein the expression of the at least one gene product is decreased; a cell or population that produces and/or secretes an endogenous or non-endogenous biological product or chemical compound. In some embodiments, the cell is a mammalian cell or a human cell. In another aspect, the present disclosure provides a cell line of or comprising the cell herein, or progeny thereof.

[0017] In another aspect, the present disclosure provides a multicellular organism comprising one or more cells herein.

[0018] In another aspect, the present disclosure provides a plant or animal model comprising one or more cells herein.

[0019] In another aspect, the present disclosure provides a gene product from a cell, a cell line, an organism, or a plant, or a animal model herein. In some embodiments, the amount of gene product expressed is greater than or less than the amount of gene product from a cell that does not have altered expression.

[0020] In another aspect, the present disclosure provides an isolated Cas12b effector protein from Table 1 or 2.

[0021] In another aspect, the present disclosure provides an isolated nucleic acid encoding the Cas12b effector protein. In some embodiments, the isolated nucleic acid is a DNA and further comprises a sequence encoding a crRNA and a tracr RNA.

[0022] In another aspect, the present disclosure provides an isolated eukaryotic cell comprising the nucleic acid herein or Cas12b protein.

[0023] In another aspect, the present disclosure provides non-naturally occurring or engineered system comprising i) an mRNA encoding a Cas12b effector protein from Table 1 or 2, ii) a guide sequence, and iii) a tracr RNA. In some embodiments, the tracr RNA is fused to the crRNA at the 5′ end of the direct repeat.

[0024] In another aspect, the present disclosure provides an engineered system for site directed base editing comprising a targeting domain and an adenosine deaminase, cytidine deaminase, or catalytic domain thereof, wherein the targeting domain comprise a Cas12b effector protein, or fragment thereof which retains oligonucleotide-binding activity and a guide molecule. In some embodiments, the Cas12b effector protein is catalytically inactive. In some embodiments, the Cas12b effector protein is selected from Table 1 or 2. In some embodiments, the Cas12b effector protein originates from a bacterium selected from the group consisting of: Alicyclobacillus kakegawensis, Bacillus sp. V3-13, Bacillus hisashii, Lentisphaeria bacterium, and Laceyella sediminis.

[0025] In another aspect, the present disclosure provides a method of modifying an adenosine or cytidine in one or more target oligonucleotides of interest, comprising delivering to said one or more target oligonucleotides, the composition herein. In some embodiments, the for use in the treatment or prevention of a disease caused by transcripts containing a pathogenic T-C or A-G point mutation. In another aspect, the present disclosure provides an isolated cell obtained from the method herein and/or comprising the composition herein. In some embodiments, said eukaryotic cell, preferably a human or non-human animal cell, optionally a therapeutic T cell or antibody-producing B-cell or wherein said cell is a plant cell.

[0026] In another aspect, the present disclosure provides a non-human animal comprising said modified cell or progeny thereof.

[0027] In another aspect, the present disclosure provides plant comprising the modified cell herein.

[0028] In another aspect, the present disclosure provides modified cells for use in therapy, preferably cell therapy.

[0029] In another aspect, the present disclosure provides a method of modifying an adenine or cytosine in a target oligonucleotide, comprising delivering to said target oligonucleotide: a catalytically inactive Cas12b protein; a guide molecule which comprises a guide sequence linked to a direct repeat; and an adenosine or cytidine deaminase protein or catalytic domain thereof; wherein said adenosine or cytidine deaminase protein or catalytic domain thereof is covalently or non-covalently linked to said catalytically inactive Cas12b protein or said guide molecule or is adapted to linked thereto after delivery; wherein said guide molecule forms a complex with said catalytically inactive Cas12b and directs said complex to bind said target oligonucleotide, wherein said guide sequence is capable of hybridizing with a target sequence within said target oligonucleotide to form an oligonucleotide duplex.

[0030] In some embodiments, (A) said Cytosine is outside said target sequence that forms said oligonucleotide duplex, wherein said cytidine deaminase protein or catalytic domain thereof deaminates said Cytosine outside said RNA duplex, or (B) said Cytosine is within said target sequence that forms said RNA duplex, wherein said guide sequence comprises a non-pairing Adenine or Uracil at a position corresponding to said Cytosine resulting in a C-A or C-U mismatch in said oligonucleotide duplex, and wherein the cytidine deaminase protein or catalytic domain thereof deaminates the Cytosine in the oligonucleotide duplex opposite to the non-pairing Adenine or Uracil. In some embodiments, said adenosine deaminase protein or catalytic domain thereof deaminates said Adenine or Cytosine in the oligonucleotide duplex. In some embodiments, the Cas12b effector protein is selected from Table 1 or 2. In some embodiments, the Cas12b protein originates from a bacterium selected from the group consisting of: Alicyclobacillus kakegawensis, Bacillus sp. V3-13, Bacillus hisashii, Lentisphaeria bacterium, and Laceyella sediminis.

[0031] In another aspect, the present disclosure provides a system for detecting the presence of nucleic acid target sequences in one or more in vitro samples, comprising: a Cas12b protein; at least one guide polynucleotide comprising a guide sequence designed to have a degree of complementarity with the target sequence, and designed to form a complex with the Cas12b; and an oligonucleotide-based masking construct comprising a non-target sequence; wherein the Cas12b exhibits collateral nuclease activity and cleaves the non-target sequence of the oligo-nucleotide based masking construct once activated by the target sequence.

[0032] In another aspect, the present disclosure provides a system for detecting the presence of one or more target polypeptides in one or more in vitro samples comprising: a Cas12b protein; one or more detection aptamers, each designed to bind to one of the one or more target polypeptides, each detection aptamer comprising a masked prompter binding site or masked primer binding site and a trigger sequence template; and an oligonucleotide-based masking construct comprising a non-target sequence.

[0033] In some embodiments, the system further comprises nucleic acid amplification reagents to amplify the target sequence or the trigger sequence. In some embodiments, the nucleic acid amplification reagents are isothermal amplification reagents. In some embodiments, the Cas12b protein is selected from Table 1 or 2. In some embodiments, the Cas12b effector protein originates from a bacterium selected from the group consisting of: Alicyclobacillus kakegawensis, Bacillus sp. V3-13, Bacillus hisashii, Lentisphaeria bacterium, and Laceyella sediminis.

[0034] In another aspect, the present disclosure provides a method for detecting nucleic acid sequences in one or more in vitro samples, comprising: contacting one or more samples with: i) a Cas12b protein, ii) at least one guide polynucleotide comprising a guide sequence designed to have a degree of complementarity with the target sequence, and designed to form a complex with the Cas12b protein; and iii) an oligonucleotide-based masking construct comprising a non-target sequence; and wherein said Cas12 protein exhibits collateral nuclease activity and cleaves the non-target sequence of the oligo-nucleotide-based masking construct.

[0035] In some embodiments, the Cas12b protein is selected from Table 1 or 2. In some embodiments, the Cas12b protein originates from a bacterium selected from the group consisting of: Alicyclobacillus kakegawensis, Bacillus sp. V3-13, Bacillus hisashii, Lentisphaeria bacterium, and Laceyella sediminis. In another aspect, the present disclosure provides a non-naturally occurring or engineered composition comprising a Cas12b protein linked to an inactive first portion of an enzyme or reporter moiety, wherein the enzyme or reporter moiety is reconstituted when contacted with a complementary portion of the enzyme or reporter moiety. In some embodiments, the enzyme or reporter moiety comprises a proteolytic enzyme. In some embodiments, the Cas12 protein comprises a first Cas12b protein and a second Cas12b protein linked to the complementary portion of the enzyme or reporter moiety. In some embodiments, the composition further comprises i) a first guide capable of for forming a complex with the first Cas12b protein and hybridizing to a first target sequence of a target nucleic acid; and ii) a second guide capable of forming a complex with the second Cas12b protein, and hybridizing to a second target sequence on the target nucleic acid. In some embodiments, the proteolytic enzyme comprises a caspase. In some embodiments, the proteolytic enzyme comprises tobacco etch virus (TEV).

[0036] In another aspect, the present disclosure provides a method of providing a proteolytic activity in a cell containing a target oligonucleotide, comprising a) contacting a cell or population of cells with: i) a first Cas12b effector protein linked to an inactive portion of a proteolytic enzyme; ii) a second Cas12b effector protein linked to a complementary portion the proteolytic enzyme, wherein proteolytic activity of the proteolytic enzyme is reconstituted when the first portion and the complementary portion of the proteolytic enzyme are contacted; iii) a first guide that binds to the first Cas12b effector protein and hybridizes to a first target sequence of the target oligonucleotide; and iv) a second guide that binds to the second Cas12b effector protein and hybridizes to a second target sequence of the target oligonucleotide, whereby the first portion and a complementary portion of the proteolytic enzyme are contacted and the proteolytic activity of the proteolytic enzyme is reconstituted.

[0037] In some embodiments, the proteolytic enzyme is a caspase. In some embodiments, the proteolytic enzyme is TEV protease, wherein the proteolytic activity of the TEV protease is reconstituted, whereby a TEV substrate is cleaved and activated. In some embodiments, the TEV substrate is a procaspase engineered to contain TEV target sequences whereby cleavage by the TEV protease activates the procaspase.

[0038] In another aspect, the present disclosure provides a method of identifying a cell containing an oligonucleotide of interest, the method comprising contacting the oligonucleotide in the cell with a composition which comprises: i) a first Cas12b effector protein linked to an inactive first portion of a proteolytic enzyme; ii) a second Cas12b effector protein linked to a complementary portion of the proteolytic enzyme wherein activity of the proteolytic enzyme is reconstituted when the first portion and the complementary portion of the proteolytic enzyme are contacted; iii) a first guide that binds to the first Cas12b effector protein and hybridizes to a first target sequence of the oligonucleotide; iv) a second guide that binds to the second Cas12b effector protein and hybridizes to a second target sequence of the oligonucleotide; and v) a reporter which is detectably cleaved, wherein the first portion and a complementary portion of the proteolytic enzyme are contacted when the oligonucleotide of interest is present in the cell, whereby the activity of the proteolytic enzyme is reconstituted and detectably cleaves the reporter.

[0039] In another aspect, the present disclosure provides a method of identifying a cell containing an oligonucleotide of interest, the method comprising contacting the oligonucleotide in the cell with a composition which comprises: i) a first Cas12b effector protein linked to an inactive first portion of a reporter; ii) a second Cas12b effector protein linked to a complementary portion of the reporter wherein activity of the reporter is reconstituted when the first portion and the complementary portion of the reporter are contacted; iii) a first guide that binds to the first Cas12b effector protein and hybridizes to a first target sequence of the oligonucleotide; iv) a second guide that binds to the second Cas12b effector protein and hybridizes to a second target sequence of the oligonucleotide; and v) the reporter, wherein the first portion and a complementary portion of the reporter are contacted when the oligonucleotide of interest is present in the cell, whereby the activity of the reporter is reconstituted. In some embodiments, the reporter is a fluorescent protein or a luminescent protein.

[0040] These and other aspects, objects, features, and advantages of the example embodiments will become apparent to those having ordinary skill in the art upon consideration of the following detailed description of illustrated example embodiments.

### BRIEF DESCRIPTION OF THE DRAWINGS

[0041] An understanding of the features and advantages of the present invention will be obtained by reference to the following detailed description that sets forth illustrative embodiments, in which the principles of the invention may be utilized, and the accompanying drawings of which:

[0042] FIG. 1 depicts the Phycisphaerae bacterium CRISPR-C2c1 locus. Small RNAseq revealed the location of the tracrRNA and the architecture of the mature crRNAs.

[0043] FIGS. 2A-2C shows predicted tracrRNAs (FIG. 2A) (SEQ ID NO:1-11) and fold prediction of duplexes of tracers (green) with direct repeat (red) for Tracer #1 (FIG. 2B) and Tracer #5 (FIG. 2C) (SEQ ID NO:12, 656, and 13).

[0044] FIG. 3A shows results of a PAM screen for Seqlogos are provided for the most relaxed predicted PAM and FIG. 3B shows the most stringent predicted PAM.

[0045] FIG. 4 shows in vivo confirmation of the PhbC2c1 PAM as TTH (H=A, T or C). Cells were transformed with plasmid DNA encoding different PAM sequences located 5′ of a recognizable protospacer.

[0046] FIG. 5 depicts sequence specific nickase amplification using Cpf1 nickase.

[0047] FIG. 6 illustrates aptamer color generation.

[0048] FIG. 7 depicts the Planctomycetes CRISPR-C2c1 locus. Small RNAseq revealed the location of the tracrRNA and the architecture of the mature crRNAs.

[0049] FIG. 8A shows results of a PAM screen for Seqlogos are provided for the most relaxed predicted PAM and FIG. 8B shows the most stringent predicted PAM (B). The screen shows that the PAM for Planctolycetes is TTR (R=G or A).

[0050] FIG. 9 shows in vivo confirmation of the Planctomycetes C2c1 PAM as TTR (R=G or A). Cells were transformed with plasmid DNA encoding different PAM sequences located 5′ of a recognizable protospacer.

[0051] FIG. 10 shows an example of a plasmid for isolation of C2c1 with crRNA-tracrRNA complex. The plasmid contains PhyciC2c1 and/or tracrRNA and/or CRISPR array. Processed crRNAs and tracrRNA will complex with C2c1 and can be co-purified with the C2c1 protein (C2c1-RNA complexes).

[0052] FIG. 11A shows bands of PhyciC2c1 and PlancC2c1 in a protein pulldown assay. RNase and DNase digestion experiments were performed, which demonstrated that RNA is present in PhysiC2c1 proteins (PhyC2c1 proteins were susceptible to RNase digestion but not DNase digestion) in FIG. 11B. The presence of RNA in the PhysiC2c1 proteins was further confirmed in FIG. 11C. The size of co-purified RNAs matches crRNA but appears larger than 118nt predicted tracrRNA.

[0053] FIG. 12 provides conditions and results for in vitro cleavage experiment, which demonstrated that PhysiC2c1-RNA complex can cleave DNA containing a protospacer sequence matching the first guide of the CRISPR array.

[0054] FIG. 13 shows different sgRNAs. Small RNA-seq from the BhCas12b locus expressed in E. coli revealed tracrRNA and crRNA. Diagram of fusions of tracrRNA and crRNA to form sgRNA variants. (SEQ ID NO:14-29)

[0055] FIG. 14 shows indel percentage obtained with the different sgRNAs of FIG. 13 after plasmid transfection, for different target sites. Cas12b used was from Bacillus hisashii strain C4. Expression of BhCas12b and sgRNA variants in HEK293 cells generates indel mutations at multiple genomic sites.

[0056] FIGS. 15A-15C show PAM discovery, in vitro cleavage with purified protein and RNA using Cas12b orthologs from Ls, Ak, and Bv, respectively. (FIG. 15A—SEQ ID NO:30 and 657; FIG. 15B—SEQ ID NO:31 and 658; FIG. 15C—SEQ ID NO:32 and 659). FIGS. 15D-15E show in vitro cleavage with purified protein and RNA using Cas12B orthologs from Phyci and Planc, respectively.

[0057] FIG. 16 shows purified AmCas12b (AmC2C1) protein and in vitro cleavage assay with different predicted tracr RNAs from small RNAseq.

[0058] FIGS. 17A-17E show sgRNA designs for AmC2C1. (FIG. 17A—SEQ ID NO:33 and 660; FIG. 17B—SEQ ID NO:34 and 661; FIG. 17C—SEQ ID NO:35; FIG. 17D—SEQ ID NO:36; FIG. 17E—SEQ ID NO:37)

[0059] FIG. 18 shows in vitro cleavage with AmC2C1 for comparison of sgRNA efficiencies.

[0060] FIG. 19 shows activities of AmC2C1 RuvC mutants.

[0061] FIG. 20 shows determination of PAMs for Cas12b orthologs by an in vitro PAM screen.

[0062] FIG. 21A shows small RNAseq tracr prediction. FIG. 21B shows BhC2C1 (Bacillus hisashii Cas12b) PAM from in vivo screen. FIG. 21C shows BhC2C1 protein purification. FIG. 21D shows in vitro cleavage with BhC2C1 protein and predicted tracr RNAs at 37° C. and 48° C., respectively.

[0063] FIGS. 22A-22D show sgRNA designs for BhC2C1. (FIG. 22A—SEQ ID NO:38 and 662; FIG. 22B—SEQ ID NO:39; FIG. 22C—SEQ ID NO:40; FIG. 22D—SEQ ID NO:41)

[0064] FIG. 23 shows a plasmid map of an exemplary construct containing BhC2C1.

[0065] FIG. 24 shows indel percentage obtained with the different sgRNAs in Table 12 after plasmid transfection, for different target sites in Table 12. Cas12b used was BvCas12b. (SEQ ID NO:42-47)

[0066] FIG. 25 shows a plasmid map of an exemplary construct containing BvCas12b.

[0067] FIG. 26 shows a plasmid map of an exemplary construct containing BhCas12b.

[0068] FIG. 27 shows a plasmid map of an exemplary construct containing EbCas12b.

[0069] FIG. 28 shows a plasmid map of an exemplary construct containing AkCas12b.

[0070] FIG. 29 shows a plasmid map of an exemplary construct containing PhyciCas12b.

[0071] FIG. 30 shows a plasmid map of an exemplary construct containing PlancCas12b.

[0072] FIG. 31 shows a plasmid map of an exemplary construct pZ143-pcDNA3-BvCas12b containing BvCas12b.

[0073] FIG. 32 shows a plasmid map of an exemplary construct pZ147-BvCas12b-sgRNA-scaffold containing BvCas12b sgRNA scaffold.

[0074] FIG. 33 shows a plasmid map of an exemplary construct pZ148-BhCas12b-sgRNA-scaffold containing BhCas12b sgRNA scaffold.

[0075] FIG. 34 shows a plasmid map of an exemplary construct pZ149-BhCas12b-S893R-K846R-E836G containing BhCas12b with mutations at 5893, K846, and E836.

[0076] FIG. 35 shows a plasmid map of an exemplary construct pZ150-pCDNA3-BhCas12b-S893R-K846R-E836K containing BhCas12b with mutations at S893, K846, and E836.

[0077] FIG. 36 shows PAM discovery results for BhCas12b under various conditions.

[0078] FIG. 37 shows PAM discovery results for BvCas12b under various conditions.

[0079] FIG. 38 shows indel percentages of BhCas12b variants at different binding sites

[0080] FIG. 39 shows indel percentages of additional BhCas12b variants at different binding sites.

[0081] FIG. 40A shows HDR with cleavage by BhCas12b (Variant 4 in Example 20) and BvCas12b at DNMT1-1. (SEQ ID NO:48-51) FIG. 40B shows HDR with cleavage by BhCas12b (Variant 4 in Example 20) and BvCas12bat VEGFA-2 (SEQ ID NO:52-55).

[0082] FIG. 41A shows comparison of indels percentages of AsCas12a at TTTV PAMs and BhCas12b variant 4 and BvCas12b ATTN PAMS. FIG. 41B shows breakdown of BhCas12b variant 4 and BvCas12b activities at different PAM sequences.

[0083] FIG. 42A shows schematic of a VEGFA target including the desired changes to be introduced with ssDNA donors (SEQ ID NO:56-59). FIG. 42B shows indel activity of each nuclease at the VEGFA target site. FIG. 42C shows percentage of cells that contain the desired edit (two nucleotide substitution) at VEGFA site. FIG. 42D shows Schematic of a DNMT1 target including the desired changes to be introduced with ssDNA donors (SEQ ID NO:60-63).

[0084] FIG. 42E shows indel activity of each nuclease at the DNMT1 target site. FIG. 42F shows percentage of cells that contain the desired edit (two nucleotide substitution) at DNMT1site.

[0085] FIG. 43—Left panel shows the targeted exon of CXCR4 and the CXCR4 sequences targeted by BhCas12b (v4) and BvCas12b, respectively (SEQ ID NO:64-77). Right panel shows indel percentages showing the effects of BhCas12b(v4) and BvCas12b on CXCR4 in the T cells from the two donors.

[0086] FIGS. 44A-44E. Identification of mesophilic Cas12b nucleases. FIG. 44A) Locus schematics and protein domain structure highlighting the differences between Cas9, Cas12a, and Cas12b nucleases. Crystal structures of SpCas9 (PDB:4008), AsCas12a (PDB:5b43), and AacCas12b (PDB:5u30). FIG. 44B) In vitro reconstitution of Cas12b systems with purified Cas12b protein and synthesized crRNA and tracrRNA identified through RNA-Seq. Reactions were carried out at the indicated temperatures for 90 min and 250 nM Cas12b protein. FIG. 44C, FIG. 44D) AkCas12b and BhCas12b indel activity in 293T cells with six sgRNA variants. Error bars represent s.d. from n=4 replicates. See FIGS. 50B and 50C for sgRNA sequences. FIG. 44E) Schematic of BhCas12b sgRNA structure and the location of tested variants (SEQ ID NO:78).

[0087] FIGS. 45A-45H. Rational engineering of BhCas12b. FIG. 45A) In vitro Cas12b reactions with differentially labelled DNA strands. A slower migrating product is observed during native PAGE separation and separation by denaturing PAGE reveals a preference for AkCas12b and BhCas12b to cut the non-target strand at lower temperatures. FIG. 45B) Location of 10 of the 12 tested residues in the pocket between the target strand and the RuvC active site (purple). BhCas12b residues are highlighted in the structure of the highly similar BthCas12b (PDB: 5wti). FIG. 45C) Indel activity of 268 BhCas12b mutations at DNMT1 target 4 and VEGFA target 2 normalized to wild-type (grey symbols). Error bars represent s.d. from n=2 replicates. FIG. 45D) Location of surface exposed residues mutated to glycine. FIG. 45E) Indel activity of 66 BhCas12b mutations at DNMT1 target 4 and VEGFA target 2 normalized to wild-type (grey symbols). Error bars represent s.d. from n=2 replicates. FIG. 45F) Summary of BhCas12b hyperactive variants. FIG. 45G) Indel activity of BhCas12b variants at 4 target sites. Error bars represent s.d. from n=3-6 replicates. FIG. 45H) In vitro cleavage with increasing concentrations of BhCas12b WT and v4 variant. Gel is representative image from n=2 experiments.

[0088] FIGS. 46A-46G. BhCas12b v4 and BvCas12b mediate genome editing in human cell lines. FIG. 46A) Indel activity in 293T cells of AsCpf1 at 28 TTTV targets, BhCas12b v4 at 33 ATTN targets, and BvCas12b at 37 ATTN targets. Each dot represents a single target site, averaged from n=4 replicates. FIG. 46B) Average indel length from Cas12b genome editing averaged from 30 active guides. FIG. 46C) Schematic of a DNMT1 target site targetable by SpCas9 and Cas12a/b nucleases and a 120 nt ssODN donor containing a TG to CA mutation and PAM disrupting mutations (SEQ ID NO:79-83). FIG. 46D) Indel activity of each nuclease at the locus. Error bars represent s.d. from n=8 replicates. FIG. 46E) Frequency of homology-directed repair (HDR) using a target strand (T) or non-target strand (NT) donor. Grey bars indicate the frequency of TG to CA mutation, while red bars indicate perfect edits containing the HDR sequence in panel c with no mutations. Error bars represent s.d. from n=6 replicates. FIG. 46F) Average indel length during genome editing with 30 active BhCas12b guides, 45 active AsCas12a guides, and 39 active SpCas9 guides. FIG. 46G) Indel activity in CD4+ human T cells following BhCas12b v4 RNP delivery. Each dot represents an individual electroporation (n=2). Source data are provided as a Source Data file.

[0089] FIGS. 47A-47B. BhCas12b v4 and BvCas12b are highly specific nucleases. FIG. 47A) Indel activity in 293T cells at 9 target sites selected for Guide-Seq analysis. Error bars represent s.d. from n=4 replicates. FIG. 47B) Guide-Seq analysis showing the number and relative proportion of detected cleavage site sites for each nuclease. Off-targets are shown as light grey wedges while the on-target site is highlighted in blue with the fraction of on-target reads shown below. Off-targets were only detected with SpCas9, see FIG. 55 for full analysis.

[0090] FIGS. 48A-48E PAM discovery of Cas12b orthologs. FIG. 48A) Alignment of Cas12b orthologs FIG. 48B) Phylogenetic tree of the subtype V-B effector Cas12b proteins based on the alignment. Sequences are denoted by Genbank protein accession number and species name. The proteins that were experimentally studied in this work are shown in bold. The four proteins that showed robust editing activity at 37 C and were studied in detail are underlined. FIG. 48C) Schematic of the PAM discovery assay in E. coli. FIG. 48D) Depleted PAMs were detected in only 4 out of 14 Cas12b systems in E. coli. A depletion threshold was set at a −log₂ ratio of 3.32 (dotted line) except for EbCas12b which had a threshold set at 2.32. Depleted PAMs are shown as sequence motifs as well as PAM wheels²² starting in the middle of the wheel for the first 5′ base exhibiting sequence information. FIG. 48E) Phylogenetic tree of the subtype V-B effector Cas12b proteins. Sequences are denoted by Genbank protein accession number and species name. The proteins that were experimentally studied in this work are highlighted in blue.

[0091] FIGS. 49A-49F. Cas12b RNA-Seq and in vitro reconstitution. FIG. 49A-49D) Alignment of small RNA-Seq reads for AkCas12b, BhCas12b, EbCas12b, and LsCas12b. The location of the tracrRNA used in cleavage reactions is highlighted in yellow. FIG. 49E) Coomassie stained SDS-PAGE gel of purified Cas12b proteins used in this study and commercially produced AsCas12a (IDT). FIG. 49F) In vitro cleavage reactions with AkCas12b and BhCas12b comparing tracrRNA and crRNA to v1 sgRNA scaffolds.

[0092] FIGS. 50A-50E. Cas12b sgRNA optimization in mammalian cells. FIG. 50A) Schematic of expression constructs and assay for indel activity in mammalian cells. FIG. 50B) AkCas12b sgRNA variants (SEQ ID NO:84-89). FIG. 50C) BhCas12b sgRNA variants (SEQ ID NO:90-95). FIG. 50D) Schematic of AkCas12b sgRNA structure and the location of tested variants (SEQ ID NO:96). FIG. 50E) Indel activity in 293T cells with BhCas12b and varying spacer lengths. Error bars represent s.d. from n=2 replicates.

[0093] FIGS. 51A-51J. Rational engineering of BhCas12b. FIG. 51A) Comparison of indel activity between BhCas12b and the highly similar BthCas12b in 293T cells. Error bars represent s.d. from n=2 replicates. FIG. 51B-FIG. 51E) Indel activity of BhCas12b mutant combinations at DNMT1 target 4 and VEGFA target 2. Error bars represent s.d. from a minimum of n=2 replicates. FIG. 51F) BhCas12b v4 mutations modeled into the structure of BthCas12b using Pymol (Schrodinger). FIG. 51G) Coomassie stained SDS-PAGE gel of purified BhCas12b WT and v4 protein. FIG. 51H) In vitro cleavage time-course with BhCas12b WT and v4 variant. Gel is representative image from n=3 experiments. FIG. 51I, FIG. 51J) Quantitation of dsDNA cleavage products (FIG. 51I) and upper nicked product (FIG. 51J) from the reactions shown in panel h. Error bars represent s.d. from n=3 experiments.

[0094] FIGS. 52A-52J. Characterization of BvCas12b. FIG. 52A) PAM discovery as described in FIGS. 48C and 48D. FIG. 52B) Alignment of small RNA-Seq reads for BvCas12b. The location of the tracrRNA used in cleavage reactions is highlighted in yellow.

[0095] FIGS. 52C-52D) In vitro reconstitution of BvCas12 with purified protein and synthesized RNA Reactions were carried out at the indicated temperatures for 90 min and 250 nM BvCas12b protein. FIG. 52E) Coomassie stained SDS-PAGE gel of purified BvCas12b. FIG. 52F) BvCas12b sgRNA variants (SEQ ID NO:97-102). FIG. 52G) Schematic of BvCas12b sgRNA structure and the location of tested variants (SEQ ID NO:103). FIG. 52H) BvCas12b indel activity in 293T cells with sgRNA variants. Error bars represent s.d. from n=4 replicates. FIG. 52) BvCas12b indel activity in 293T cells at 57 targets. Each dot represents a single target site, averaged from n=4 replicates. FIG. 52J) Correlation of BhCas12b v4 and BvCas12b activity at matched target sites. Source data are provided as a Source Data file.

[0096] FIGS. 53A-53E. Mutagenesis of BvCas12b. FIG. 53A) Alignment of BhCas12b positions in the target-strand identified in highlighting positions and their corresponding amino acid in BvCas12b. FIG. 53B) In vitro BvCas12b reactions with differentially labelled DNA strands as described in FIG. 45A. FIG. 53C) Indel activity of 79 BvCas12b mutations targeting residues Q635, D748, R849, H896, T909, I914 and I919. Indels were measured at DNMT1 target 6 and VEGFA target 5 normalized to wild-type (grey symbols). Error bars represent s.d. from n=2 replicates. FIGS. 53D-53E) Indel activity of BhCas12b mutations at DNMT1 target 6 and VEGFA target 5. Error bars represent s.d. from n=2 replicates.

[0097] FIGS. 54A-54F. BhCas12b v4 and BvCas12b mediated genome editing in human cells lines. FIG. 54A) Indel activity in 293T cells BhCas12b v4 at 56 targets, and BvCas12b at 57 targets across. Each dot represents a single target site, averaged from n=4 replicates. FIG. 54B) Correlation of BhCas12b v4 and BvCas12b activity at matched target sites. FIG. 54C) Analysis of PAM prevalence for Class 2 CRISPR-Cas nucleases. Probability mass function for the distance from each base within non-masked human coding sequences to the nearest Cas9 or Cas12 cleavage site. FIG. 54D) Schematic of a VEGFA target site targetable by SpCas9 and Cas12b nucleases and a 120 nt ssODN donor containing a TC to CA mutation and PAM disrupting mutations (SEQ ID NO:104-108). FIG. 54E) Indel activity of each nuclease at the locus. Error bars represent s.d. from n=3 replicates. FIG. 54F) Frequency of homology-directed repair (HDR) using a target strand (T) or non-target strand (NT) donor. Grey bars indicate the frequency of TC to CA mutation, while blue bars indicate perfect edits containing the HDR sequence in panel d with no mutations. Error bars represent s.d. from n=3 replicates.

[0098] FIGS. 55A-55C. BhCas12b v4 and BvCas12b mismatch tolerance and specificity.

[0099] FIG. 56A) Guide-Seq analysis of unmatched targets showing the number and relative proportion of detected cleavage sites for each nuclease. Off-targets are shown as light grey wedges while the on-target site is highlighted in blue with the fraction of on-target reads shown below. See FIG. 57 for full analysis. FIGS. 55B-55C) Cas12b indel activity in 293T cells when mismatches are present between the guide sgRNA and target DNA. Mismatches were inserted in the sgRNA to match the target strand (i.e. C to G, A to T). BhCas12b v4 was tested at DNMT1 target 6 and VEGFA target 2, while BvCas12b was tested at DNMT1 target 6 and VEGFA target 5. Error bars represent s.d. from n=4 replicates.

[0100] FIG. 56. Specificity analysis of matched CRISPR-Cas nuclease targets. Full Guide-Seq analysis of detected off-targets in FIG. 47B. A list of detected cleavage sites (up to 20 per target) is presented for each nuclease with the on-target site denoted with a small box. Mismatches to the guide sequence are highlighted. Target 1:EMX1 (SEQ ID NO:109-130); Target 2:EMX1 (SEQ ID NO:131-152); Target 3:DNMT1 (SEQ ID NO:153-174); Target 4:CXCR4 (SEQ ID NO:175-176); Target 5:CXCR4 (SEQ ID NO:178-181); Target 6:CXCR4 (SEQ ID NO:182-186); Target 7:VEGFA (SEQ ID NO:187-209); Target 8:GRIN2B (SEQ ID NO:210-215); Target 9:CXCR4 (SEQ ID NO:216-221); Target 10:HPRT1 (SEQ ID NO:222-225).

[0101] FIG. 57. Specificity analysis of unmatched CRISPR-Cas nuclease targets. Full Guide-Seq analysis of detected off-targets in FIG. 56. A list of detected cleavage sites (up to 20 per target) is presented for each nuclease with the on-target site denoted with a small box. Mismatches to the guide sequence are highlighted. SpCas9 unmatched 1:DNMT1 (SEQ ID NO:226); SpCas9 unmatched 2:EMX1 (SEQ ID NO:227-246); SpCas9 unmatched 3:VEGFA (SEQ ID NO:247-248); SpCas9 unmatched 4:VEGFA (SEQ ID NO:249-268); SpCas9 unmatched 5:VEGFA (SEQ ID NO:269-288); SpCas9 unmatched 6:GRIN2B (SEQ ID NO:289-290); AsCas12a unmatched 1:DNMT1 (SEQ ID NO:291); AsCas12a unmatched 2:VEGFA (SEQ ID NO:292-293); AsCas12a unmatched 2:EMX1 (SEQ ID NO:294); AsCas12a unmatched 2:EMX1 (SEQ ID NO:295); SpCas9 unmatched 7:VEGFA (SEQ ID NO:296-311); SpCas9 unmatched 8:EMX1 (SEQ ID NO:312-320); SpCas9 unmatched 9:GRIN2B (SEQ ID NO:321-322); SpCas9 unmatched 10:TUBB (SEQ ID NO:323-334); BhCas12b v4 unmatched 1:DNMT1-BvCas12b unmatched 8:DNMT1 (SEQ ID NO:335-353); BhCas12b v4 unmatched 9:CXCR4-BvCas12b unmatched 14:VEGFA (SEQ ID NO:354-367).

[0102] FIG. 58. Shows a structurally predicted ssDNA path in Cas12 (based on PDB structure 5U30).

[0103] FIG. 59 shows dose responses of the RESCUE mutants were tested on T motif.

[0104] FIG. 60 shows dose responses of the RESCUE mutants were tested on the C and G motif.

[0105] FIGS. 61 and 62 show endogenous targeting with RESCUE v3, v6, v7, and v8.

[0106] FIG. 63 shows screening for mutations for RESCUE v9 was performed.

[0107] FIG. 64 shows potential mutations for RESCUEv9 were identified.

[0108] FIG. 65 shows Base flip and motif testing were performed.

[0109] FIG. 66 shows effects of RESCUEv9 was tested on different motif flip.

[0110] FIG. 67 shows comparison between B6 and B12 with RESCUE v1 and v8 with 50 bp guides.

[0111] FIG. 68 shows comparison between B6 and B12 with RESCUE v1 and v8 with 30 bp guides.

[0112] FIG. 69 shows a summary of RESCUE mutations screened.

[0113] FIG. 70 is a graph illustrating results of an experiment in which better beta catenin mutants were selected.

[0114] FIG. 71 shows graphs illustrating results of RESCUE round 12.

[0115] FIG. 72 is a schematic illustrating the beta catenin migration assay.

[0116] FIG. 73 is a graph showing results of a cell migration assay induced by beta catenin.

[0117] FIG. 74 shows graphs illustrating that specificity mutations eliminate A-I off-targets.

[0118] FIG. 75 shows graphs illustrating that targeting Stat1/3 phosphorylation sites reduces signaling.

[0119] FIG. 76 shows graphs illustrating that targeting Stat1/3 phosphorylation sites reduces signaling, with FIG. 64A showing results for STAT1 non-treatment and FIG. 64B showing results for STAT1 IFNγ treatment.

[0120] FIG. 77 shows graphs illustrating that targeting Stat1/3 phosphorylation sites reduces signaling, with FIG. 65A showing results for STAT3 IL6 activation and FIG. 65B showing results for STAT3 no treatment.

[0121] FIG. 78 shows graphs illustrating results of RESCUE round 12.

[0122] FIG. 79 shows graphs illustrating results from a RESCUE round 13.

[0123] FIG. 80 is a graph showing results of a cell migration assay induced by beta catenin.

[0124] FIG. 81—Bhv4 truncations with C to T base editing capabilities. After removing the C-terminal 142 amino acids of catalytically inactive Bhv4 (dBhv4Δ143—inactivating mutation D574A, new size 966 amino acids) and fusing a linker and rat Apobec domain to the C-terminal end, C to T base editing is observed with frequencies up to 10.95% at guide base pair position 14 on the non-target strand. A 6.97% editing efficiency is detected at guide position 15. This activity is guide dependent. The addition of the uracil-DNA glycosylase inhibitor (UGI) domain, either through fusion to the existing construct or free expression, is expected to increase this C to T conversion. The listed guide sequence (capitalized letters) targets a region inside GRIN2B in BEK 293T cells (SEQ ID NO:368).

[0125] FIGS. 82A-82C—FIG. 82A) Comparison of Cas9, Cas12b, and Cas12a indel activity in 293T cells at 9 target sites (except for Cas12a, which was only tested at the three TTTV PAM sites) selected for Guide-Seq analysis. Error bars represent s.d. from n=4 replicates. FIG. 82B) Guide-Seq analysis showing the number and relative proportion of detected cleavage sites for each nuclease. Off-targets are shown as light grey wedges while the on-target site is highlighted in purple (for SpCas9), dark blue (for BhCas12b v4), or light blue (for AsCas12a) with the fraction of on-target reads shown below. Off-targets were only detected with SpCas9. n.t., not tested. FIG. 82C) BhCas12b indel activity in 293T cells when mismatches are present between the guide sgRNA and target DNA. Mismatches were inserted in the sgRNA to match the target strand (i.e., C to G, A to T). Error bars represent s.d. from n=4 replicates.

[0126] FIG. 83—provides schematics of Cas12 truncations and N- and C-terminal fusions with APOBEC and base editing activity of same.

[0127] FIG. 84—provides Cas12 base editing data in accordance with certain example embodiments (SEQ ID NO:369-375).

[0128] FIG. 85—provides Cas12 base editing data in accordance with certain example embodiments.

[0129] FIG. 86—provides Cas12 base editing on guides in accordance with certain example embodiments (SEQ ID NO:376-377).

[0130] FIG. 87 shows an exemplary base editing approach using full-length BhCas12b (SEQ ID NO:378).

[0131] FIGS. 88A-88C—FIG. 88A shows comparison between indel activity of BhCas12b v4 and another ortholog AaCas12b. FIGS. 88B and 88C demonstrate the transduction of rat neurons with AAV1/2 expressing BhCas12b v4 or BhCas12b.

[0132] FIGS. 89A-89B—FIG. 89A shows a map of px602-bh-optimize-AAV. FIG. 89B shows a map of px602-bv-optimize-AAV.

[0133] The figures herein are for illustrative purposes only and are not necessarily drawn to scale.

### DETAILED DESCRIPTION OF THE EXAMPLE EMBODIMENTS

### General Definitions

[0134] Unless defined otherwise, technical and scientific terms used herein have the same meaning as commonly understood by one of ordinary skill in the art to which this disclosure pertains. Definitions of common terms and techniques in molecular biology may be found in Molecular Cloning: A Laboratory Manual, 2^{nd} edition (1989) (Sambrook, Fritsch, and Maniatis); Molecular Cloning: A Laboratory Manual, 4^{th} edition (2012) (Green and Sambrook); Current Protocols in Molecular Biology (1987) (F. M. Ausubel et al. eds.); the series Methods in Enzymology (Academic Press, Inc.): PCR 2: A Practical Approach (1995) (M. J. MacPherson, B. D. Hames, and G. R. Taylor eds.): Antibodies, A Laboratory Manual (1988) (Harlow and Lane, eds.): Antibodies A Laboratory Manual, 2^{nd} edition 2013 (E. A. Greenfield ed.); Animal Cell Culture (1987) (R.I. Freshney, ed.); Benjamin Lewin, Genes IX, published by Jones and Bartlet, 2008 (ISBN 0763752223); Kendrew et al. (eds.), The Encyclopedia of Molecular Biology, published by Blackwell Science Ltd., 1994 (ISBN 0632021829); Robert A. Meyers (ed.), Molecular Biology and Biotechnology: a Comprehensive Desk Reference, published by VCH Publishers, Inc., 1995 (ISBN 9780471185710); Singleton et al., Dictionary of Microbiology and Molecular Biology 2nd ed., J. Wiley & Sons (New York, N.Y. 1994), March, Advanced Organic Chemistry Reactions, Mechanisms and Structure 4th ed., John Wiley & Sons (New York, N.Y. 1992); and Marten H. Hofker and Jan van Deursen, Transgenic Mouse Methods and Protocols, 2^{nd} edition (2011)

[0135] As used herein, the singular forms “a”, “an”, and “the” include both singular and plural referents unless the context clearly dictates otherwise.

[0136] The term “optional” or “optionally” means that the subsequent described event, circumstance or substituent may or may not occur, and that the description includes instances where the event or circumstance occurs and instances where it does not.

[0137] The recitation of numerical ranges by endpoints includes all numbers and fractions subsumed within the respective ranges, as well as the recited endpoints.

[0138] The terms “about” or “approximately” as used herein when referring to a measurable value such as a parameter, an amount, a temporal duration, and the like, are meant to encompass variations of and from the specified value, such as variations of +/−10% or less, +/−5% or less, +/−1% or less, and +/−0.1% or less of and from the specified value, insofar such variations are appropriate to perform in the disclosed invention. It is to be understood that the value to which the modifier “about” or “approximately” refers is itself also specifically, and preferably, disclosed.

[0139] The term “exemplary” is used herein to mean serving as an example, instance, or illustration. Any aspect or design described herein as “exemplary” is not necessarily to be construed as preferred or advantageous over other aspects, embodiments, or designs.

[0140] As used herein, a “biological sample” may contain whole cells and/or live cells and/or cell debris. The biological sample may contain (or be derived from) a “bodily fluid”. The present invention encompasses embodiments wherein the bodily fluid is selected from amniotic fluid, aqueous humour, vitreous humour, bile, blood serum, breast milk, cerebrospinal fluid, cerumen (earwax), chyle, chyme, endolymph, perilymph, exudates, feces, female ejaculate, gastric acid, gastric juice, lymph, mucus (including nasal drainage and phlegm), pericardial fluid, peritoneal fluid, pleural fluid, pus, rheum, saliva, sebum (skin oil), semen, sputum, synovial fluid, sweat, tears, urine, vaginal secretion, vomit and mixtures of one or more thereof. Biological samples include cell cultures, bodily fluids, cell cultures from bodily fluids. Bodily fluids may be obtained from a mammal organism, for example by puncture, or other collecting or sampling procedures.

[0141] The terms “subject,” “individual,” and “patient” are used interchangeably herein to refer to a vertebrate, preferably a mammal, more preferably a human. Mammals include, but are not limited to, murines, simians, humans, farm animals, sport animals, and pets. Tissues, cells and their progeny of a biological entity obtained in vivo or cultured in vitro are also encompassed.

[0142] Various embodiments are described hereinafter. It should be noted that the specific embodiments are not intended as an exhaustive description or as a limitation to the broader aspects discussed herein. One aspect described in conjunction with a particular embodiment is not necessarily limited to that embodiment and can be practiced with any other embodiment(s). Reference throughout this specification to “one embodiment”, “an embodiment,” “an example embodiment,” means that a particular feature, structure or characteristic described in connection with the embodiment is included in at least one embodiment of the present invention. Thus, appearances of the phrases “in one embodiment,” “in an embodiment,” or “an example embodiment” in various places throughout this specification are not necessarily all referring to the same embodiment, but may. Furthermore, the particular features, structures or characteristics may be combined in any suitable manner, as would be apparent to a person skilled in the art from this disclosure, in one or more embodiments. Furthermore, while some embodiments described herein include some but not other features included in other embodiments, combinations of features of different embodiments are meant to be within the scope of the invention. For example, in the appended claims, any of the claimed embodiments can be used in any combination.

[0143] All publications, published patent documents, and patent applications cited herein are hereby incorporated by reference to the same extent as though each individual publication, published patent document, or patent application was specifically and individually indicated as being incorporated by reference.

### Overview

[0144] In one aspect, embodiments disclosed herein are directed to engineered or isolated CRISPR-Cas effector proteins and orthologs. In particular the invention relates to Cas12b effector proteins and orthologs. As used herein, the term Cas12b is used interchangeably with C2c1. The invention further relates to CRISPR-Cas systems comprising such orthologs, as well as polynucleotide sequences encoding such orthologs or systems and vectors or vector systems comprising such and delivery systems comprising such. The invention further relates to cells or cell lines or organisms comprising such Cas12b proteins, CRISPR-Cas systems, polynucleic acid sequences, vectors, vector systems, delivery systems. The invention further relates to medical and non-medical uses of such proteins, CRISPR-Cas systems, polynucleic acid sequences, vectors, vector systems, delivery systems, cells, cell lines, etc. In another aspect, embodiments disclosed herein are directed to engineered CRISPR-Cas effector proteins that comprise at least one modification compared to an unmodified CRISPR-Cas effector protein that enhances binding of the CRISPR complex to the binding site and/or alters editing preference as compared to wild type. In certain embodiments, the CRISPR-Cas effector protein is a Type V effector protein, preferably a Type V-B. In certain other example embodiments, the Type V-B effector protein is C2c1. Example C2c1 proteins suitable for use in the embodiments disclosed herein are discussed in further detail below. In another aspect, embodiments disclosed are directed to engineered CRISPR-Cas systems comprising engineered guides. As used herein, the term CRISPR effector or CRISPR protein or Cas (protein or effector) is used interchangeably with Cas12b protein or effector and may be a mutated (such as comprising point mutation(s) and/or truncations) or wild type protein.

[0145] In some examples, the present disclosure provides for a non-naturally occurring or engineered system comprising i) a Cas12b effector protein from Table 1 or 2, ii) a crRNA comprising a) a 3′ guide sequence that is capable of hybridizing to one or more target sequences, in certain embodiments, one or more target DNA sequences, and b) a 5′ direct repeat sequence, and iii) a tracr RNA, whereby there is formed a CRISPR complex comprising the Cas12b effector protein complexed with the crRNA and the tracr RNA.

[0146] In some examples, the present disclosure provides a non-naturally occurring or engineered system comprising i) a Cas12b effector protein from Table 1 or 2, and ii) a guide comprising a guide sequence capable of hybridizing to a target sequence. In some cases, the system further comprises a tracrRNA.

[0147] In another aspect, embodiments disclosed herein are directed to vectors for delivery of CRISPR-Cas effector proteins, including C2c1. In certain example embodiments, the vectors are designed so as to allow packaging of the CRISPR-Cas effector protein within a single vector. There is also an increased interest in the design of compact promoters for packing and thus expressing larger transgenes for targeted delivery and tissue-specificity. Thus, in another aspect certain embodiments disclosed herein are directed to delivery vectors, constructs, and methods of delivering larger genes for systemic delivery.

[0148] In another aspect, the present invention relates to methods for developing or designing CRISPR-Cas systems. In an aspect, the present invention relates to methods for developing or designing optimized CRISPR-Cas systems a wide range of applications including, but not limited to, therapeutic development, bioproduction, and plant and agricultural applications. In certain based therapy or therapeutics. The present invention in particular relates to methods for improving CRISPR-Cas systems, such as CRISPR-Cas system based therapy or therapeutics. Key characteristics of successful CRISPR-Cas systems, such as CRISPR-Cas system based therapy or therapeutics involve high specificity, high efficacy, and high safety. High specificity and high safety can be achieved among others by reduction of off-target effects. Improved specificity and efficacy likewise may be used to improve applications in plants and bioproduction.

[0149] Accordingly, in an aspect, the present invention relates to methods for increasing specificity of CRISPR-Cas systems, such as CRISPR-Cas system based therapy or therapeutics. In a further aspect, the invention relates to methods for increasing efficacy of CRISPR-Cas systems, such as CRISPR-Cas system based therapy or therapeutics. In a further aspect, the invention relates to methods for increasing safety of CRISPR-Cas systems, such as CRISPR-Cas system based therapy or therapeutics. In a further aspect, the present invention relates to methods for increasing specificity, efficacy, and/or safety, preferably all, of CRISPR-Cas systems, such as CRISPR-Cas system based therapy or therapeutics.

[0150] In certain embodiments, the CRISPR-Cas system comprises a CRISPR effector as defined herein elsewhere.

[0151] The methods of the present invention in particular involve optimization of selected parameters or variables associated with the CRISPR-Cas system and/or its functionality, as described herein further elsewhere. Optimization of the CRISPR-Cas system in the methods as described herein may depend on the target(s), such as the therapeutic target or therapeutic targets, the mode or type of CRISPR-Cas system modulation, such as CRISPR-Cas system based therapeutic target(s) modulation, modification, or manipulation, as well as the delivery of the CRISPR-Cas system components. One or more targets may be selected, depending on the genotypic and/or phenotypic outcome. For instance, one or more therapeutic targets may be selected, depending on (genetic) disease etiology or the desired therapeutic outcome. The (therapeutic) target(s) may be a single gene, locus, or other genomic site, or may be multiple genes, loci or other genomic sites. As is known in the art, a single gene, locus, or other genomic site may be targeted more than once, such as by use of multiple gRNAs.

[0152] CRISPR-Cas system activity, such as CRISPR-Cas system design may involve target disruption, such as target mutation, such as leading to gene knockout. CRISPR-Cas system activity, such as CRISPR-Cas system design may involve replacement of particular target sites, such as leading to target correction. CISPR-Cas system design may involve removal of particular target sites, such as leading to target deletion. CRISPR-Cas system activity may involve modulation of target site functionality, such as target site activity or accessibility, leading for instance to (transcriptional and/or epigenetic) gene or genomic region activation or gene or genomic region silencing. The skilled person will understand that modulation of target site functionality may involve CRISPR effector mutation (such as for instance generation of a catalytically inactive CRISPR effector) and/or functionalization (such as for instance fusion of the CRISPR effector with a heterologous functional domain, such as a transcriptional activator or repressor), as described herein elsewhere. Accordingly, in another aspect the invention relates to engineered compositions for site directed base editing comprising a modified CRISPR effector protein and functional domain(s). In an embodiment of the invention, there is RNA base-editing. In an embodiment of the invention, there is DNA base-editing. In certain embodiments, the functional domains comprise deaminases or catalytic domains thereof, including cytidine and adenosine deaminases. Example functional domains suitable for use in the embodiments disclosed herein are discussed in further detail below.

[0153] In certain example embodiments, an engineered CRISPR-Cas effector protein that complexes with a nucleic acid comprising a guide sequence to form a CRISPR complex, and wherein in the CRISPR complex the nucleic acid molecule target one or more polynucleotide loci and the protein comprises at least one modification compared to the unmodified protein that enhances binding of the CRISPR complex to the binding site and/or alters editing preferences as compared to wildtype. The editing preference may relate to indel formation. In certain example embodiments, the at least one modification may increase formation of one or more specific indels at a target locus. The CRISPR-Cas effector protein may be Type V CRISPR-Cas effector protein. In certain example embodiments, the CRISPR-Cas protein is C2c1, also known as Cas12b, or orthologue thereof.

[0154] The invention provides methods of genome editing or modifying sequences associated with or at a target locus of interest wherein the method comprises introducing a C2c1 effector protein complex into any desired cell type, prokaryotic or eukaryotic cell, whereby the C2c1 effector protein complex effectively functions to integrate a DNA insert into the genome of the eukaryotic or prokaryotic cell. In preferred embodiments, the cell is a eukaryotic cell and the genome is a mammalian genome. In preferred embodiments the integration of the DNA insert is facilitated by non-homologous end joining (NHEJ)-based gene insertion mechanisms. In preferred embodiments, the DNA insert is an exogenously introduced DNA template or repair template. In one preferred embodiment, the exogenously introduced DNA template or repair template is delivered with the C2c1 effector protein complex or one component or a polynucleotide vector for expression of a component of the complex. In a more preferred embodiment the eukaryotic cell is a non-dividing cell (e.g. a non-dividing cell in which genome editing via HDR is especially challenging).

[0155] The invention also provides a method of modifying a target locus of interest, the method comprising delivering to said locus a non-naturally occurring or engineered composition comprising a C2c1 loci effector protein and one or more nucleic acid components, wherein the C2c1 effector protein forms a complex with the one or more nucleic acid components and upon binding of the said complex to the locus of interest the effector protein induces the modification of the target locus of interest. In one embodiment, the modification is the introduction of a strand break. The strand break can be followed by non-homologous end joining. In another embodiment, a repair template is provided and the break is followed by homologous recombination.

[0156] According to the invention, an enzyme that modifies a nucleic acid is provided. In one such embodiment, there is base editing of DNA. In another such embodiment, there is base editing of RNA. More particularly, the invention provides deaminases and deaminase variants capable of modifying a nucleobase in a cell. In one embodiment, a deaminase targets a mismatch in a DNA/RNA duplex and edits the mismatched DNA base of the target. In another embodiment, a deaminase targets a mismatch in a RNA/RNA duplex and edits the target RNA.

[0157] In such methods the target locus of interest may be comprised in a nucleic acid molecule within a cell. The cell may be a prokaryotic cell or a eukaryotic cell. The cell may be a mammalian cell. The mammalian cell many be a non-human primate, bovine, porcine, rodent or mouse cell. The cell may be a non-mammalian eukaryotic cell such as poultry, fish or shrimp. The cell may also be a plant cell. The plant cell may be of a crop plant such as cassava, corn, sorghum, wheat, or rice. The plant cell may also be of an algae, tree or vegetable. The modification introduced to the cell by the present invention may be such that the cell and progeny of the cell are altered for improved production of biologic products such as an antibody, starch, alcohol or other desired cellular output. The modification introduced to the cell by the present invention may be such that the cell and progeny of the cell include an alteration that changes the biologic product produced.

[0158] In any of the described methods the target locus of interest may be a genomic or epigenomic locus of interest. In any of the described methods the complex may be delivered with multiple guides for multiplexed use. In any of the described methods more than one protein(s) may be used.

### CRISPR-CAS System

[0159] In general, the CRISPR system may be as used in the foregoing documents, such as WO 2014/093622 (PCT/US2013/074667) and refers collectively to transcripts and other elements involved in the expression of or directing the activity of CRISPR-associated (“Cas”) genes, including sequences encoding a Cas gene, in particular a C2c1 gene, a tracr (transactivating CRISPR) sequence (e.g. tracrRNA or an active partial tracrRNA), a tracr-mate sequence (encompassing a “direct repeat” and a tracrRNA-processed partial direct repeat in the context of an endogenous CRISPR system), a guide sequence (also referred to as a “spacer” in the context of an endogenous CRISPR system), or “RNA(s)” as that term is herein used (e.g., RNA(s) to guide C2c1, e.g. CRISPR RNA and transactivating (tracr) RNA or a single guide RNA (sgRNA) (chimeric RNA)) or other sequences and transcripts from a CRISPR locus.

[0160] In general, a CRISPR system is characterized by elements that promote the formation of a CRISPR complex at the site of a target sequence (also referred to as a protospacer in the context of an endogenous CRISPR system). In the context of formation of a CRISPR complex, “target sequence” refers to a sequence to which a guide sequence is designed to have complementarity, where hybridization between a target sequence and a guide sequence promotes the formation of a CRISPR complex. The CRISPR complex formed in embodiments comprising a Cas12b protein may comprise a complex with crRNA and tracrRNA, described elsewhere herein. The section of the guide sequence through which complementarity to the target sequence is important for cleavage activity is referred to herein as the seed sequence. A target sequence may comprise any polynucleotide, such as DNA or RNA polynucleotides. In some embodiments, a target sequence is located in the nucleus or cytoplasm of a cell, and may include nucleic acids in or from mitochondrial, organelles, vesicles, liposomes or particles present within the cell. In some embodiments, especially for non-nuclear uses, NLSs are not preferred. In some embodiments, a CRISPR system comprises one or more nuclear exports signals (NESs). In some embodiments, a CRISPR system comprises one or more NLSs and one or more NESs. In some embodiments, direct repeats may be identified in silico by searching for repetitive motifs that fulfill any or all of the following criteria: 1. found in a 2Kb window of genomic sequence flanking the type II CRISPR locus; 2. span from 20 to 50 bp; and 3. interspaced by 20 to 50 bp. In some embodiments, 2 of these criteria may be used, for instance 1 and 2, 2 and 3, or 1 and 3. In some embodiments, all 3 criteria may be used.

[0161] In general, a CRISPR system is characterized by elements that promote the formation of a CRISPR complex at the site of a target sequence. In the context of formation of a CRISPR complex, “target sequence” refers to a sequence to which a guide sequence is designed to have complementarity, where hybridization between a target DNA sequence and a guide sequence promotes the formation of a CRISPR complex.

[0162] The terms “guide molecule,” “guide RNA,” and ‘guide” are used interchangeably herein to refer to nucleic acid-based molecules, including but not limited to RNA-based molecules that are capable of forming a complex with a CRISPR-Cas protein and comprise a guide sequence having sufficient complementarity with a target nucleic acid sequence to hybridize with the target nucleic acid sequence and direct sequence-specific binding of the complex to the target nucleic acid sequence. The guide molecule or guide RNA specifically encompasses RNA-based molecules having one or more chemically modifications (e.g., by chemical linking two ribonucleotides or by replacement of one or more ribonucleotides with one or more deoxyribonucleotides), as described herein.

[0163] In certain embodiments, the target sequence should be associated with a PAM (protospacer adjacent motif) or PFS (protospacer flanking sequence or site); that is, a short sequence recognized by the CRISPR complex. Depending on the nature of the CRISPR-Cas protein, the target sequence should be selected such that its complementary sequence in the DNA duplex (also referred to herein as the non-target sequence) is upstream or downstream of the PAM. In the embodiments of the present invention where the CRISPR-Cas protein is a C2c1 protein, the complementary sequence of the target sequence in a is downstream or 3′ of the PAM. The precise sequence and length requirements for the PAM differ depending on the C2c1 protein used, but PAMs are typically 2-5 base pair sequences adjacent the protospacer (that is, the target sequence). Examples of the natural PAM sequences for different C2c1 orthologues are provided herein below and the skilled person will be able to identify further PAM sequences for use with a given C2c1 protein.

[0164] The systems may be used for the modification of the one or more target sequences (e.g., in a cell or cell population). The modification may result in altered expression of at least one gene product. In some examples, the expression of the at least one gene product may be increased. In some examples, the expression of the at least one gene product may be decreased.

[0165] In some examples, the modification may be made in a cell or population of cells, and the modification may result in the cell or population producing and/or secreting an endogenous or non-endogenous biological product or chemical compound. The chemical compound or biological product may include a low molecular weight compound, but may also be a larger compound, or any organic or inorganic molecule effective in the given situation, including modified and unmodified nucleic acids such as antisense nucleic acids, RNAi, such as siRNA or shRNA, CRISPR-Cas systems, peptides, peptidomimetics, receptors, ligands, and antibodies, aptamers, polypeptides, nucleic acid analogues or variants thereof. Examples include an oligomer of nucleic acids, amino acids, or carbohydrates including without limitation proteins, oligonucleotides, ribozymes, DNAzymes, glycoproteins, siRNAs, lipoproteins, aptamers, and modifications and combinations thereof. Agents can be selected from a group comprising: chemicals; small molecules; nucleic acid sequences; nucleic acid analogues; proteins; peptides; aptamers; antibodies; or fragments thereof. A nucleic acid sequence can be RNA or DNA, and can be single or double stranded, and can be selected from a group comprising; nucleic acid encoding a protein of interest, oligonucleotides, nucleic acid analogues, for example peptide—nucleic acid (PNA), pseudo-complementary PNA (pc-PNA), locked nucleic acid (LNA), modified RNA (mod-RNA), single guide RNA etc. Such nucleic acid sequences include, for example, but are not limited to, nucleic acid sequence encoding proteins, for example that act as transcriptional repressors, antisense molecules, ribozymes, small inhibitory nucleic acid sequences, for example but are not limited to RNAi, shRNAi, siRNA, micro RNAi (mRNAi), antisense oligonucleotides, CRISPR guide RNA, for example that target a CRISPR enzyme to a specific DNA target sequence etc. A protein and/or peptide or fragment thereof can be any protein of interest, for example, but are not limited to: mutated proteins; therapeutic proteins and truncated proteins, wherein the protein is normally absent or expressed at lower levels in the cell. Proteins can also be selected from a group comprising; mutated proteins, genetically engineered proteins, peptides, synthetic peptides, recombinant proteins, chimeric proteins, antibodies, minibodies, humanized proteins, humanized antibodies, chimeric antibodies, modified proteins and fragments thereof. Alternatively, the agent can be intracellular within the cell as a result of introduction of a nucleic acid sequence into the cell and its transcription resulting in the production of the nucleic acid and/or protein modulator of a gene within the cell. In some embodiments, the agent is any chemical, entity or moiety, including without limitation synthetic and naturally-occurring non-proteinaceous entities. In certain embodiments the agent is a small molecule having a chemical moiety. Agents can be known to have a desired activity and/or property, or can be selected from a library of diverse compounds.

### Determination of PAM

[0166] Applicants introduce a plasmid containing both a PAM and a resistance gene into the heterologous E. coli, and then plate on the corresponding antibiotic. If there is DNA cleavage of the plasmid, Applicants observe no viable colonies. In further detail, the assay is as follows for a DNA target. Two E. coli strains are used in this assay. One carries a plasmid that encodes the endogenous effector protein locus from the bacterial strain. The other strain carries an empty plasmid (e.g. pACYC184, control strain). All possible 7 or 8 bp PAM sequences are presented on an antibiotic resistance plasmid (pUC19 with ampicillin resistance gene). The PAM is located next to the sequence of proto-spacer 1 (the DNA target to the first spacer in the endogenous effector protein locus). Two PAM libraries were cloned. One has a 8 random bp 5′ of the proto-spacer (e.g. total of 65536 different PAM sequences=complexity). The other library has 7 random bp 3′ of the proto-spacer (e.g. total complexity is 16384 different PAMs). Both libraries were cloned to have in average 500 plasmids per possible PAM. Test strain and control strain are transformed with 5′PAM and 3′PAM library in separate transformations and transformed cells are plated separately on ampicillin plates. Recognition and subsequent cutting/interference with the plasmid renders a cell vulnerable to ampicillin and prevents growth. Approximately 12 h after transformation, all colonies formed by the test and control strains where harvested and plasmid DNA was isolated. Plasmid DNA was used as template for PCR amplification and subsequent deep sequencing. Representation of all PAMs in the untransformed libraries showed the expected representation of PAMs in transformed cells. Representation of all PAMs found in control strains showed the actual representation. Representation of all PAMs in test strain show which PAMs are not recognized by the enzyme and comparison to the control strain allows extracting the sequence of the depleted PAM.

[0167] For the C2c1 orthologues identified to date, the following PAMs have been identified: the Alicyclobacillus acidoterrestris ATCC 49025 C2c1p (AacC2c1) can cleave target sites preceded by a 5′ TTN PAM, where N is A, C, G, or T, more preferably where N is A, G, or T; Bacillus thermoamylovorans strain B4166 C2c1p (BthC2c1), can cleave sites preceded by a ATTN, where N is A/C/G or T.

### Codon Optimized Nucleic Acid Sequences

[0168] Where the effector protein is to be administered as a nucleic acid, the application envisages the use of codon-optimized CRISPR-Cas type V protein, and more particularly C2c1-encoding nucleic acid sequences (and optionally protein sequences). An example of a codon optimized sequence, is in this instance a sequence optimized for expression in a eukaryote, e.g., humans (i.e. being optimized for expression in humans), or for another eukaryote, animal or mammal as herein discussed; see, e.g., SaCas9 human codon optimized sequence in WO 2014/093622 (PCT/US2013/074667) as an example of a codon optimized sequence (from knowledge in the art and this disclosure, codon optimizing coding nucleic acid molecule(s), especially as to effector protein (e.g., C2c1) is within the ambit of the skilled artisan). Whilst this is preferred, it will be appreciated that other examples are possible and codon optimization for a host species other than human, or for codon optimization for specific organs is known. In some embodiments, an enzyme coding sequence encoding a DNA/RNA-targeting Cas protein is codon optimized for expression in particular cells, such as eukaryotic cells. The eukaryotic cells may be those of or derived from a particular organism, such as a plant or a mammal, including but not limited to human, or non-human eukaryote or animal or mammal as herein discussed, e.g., mouse, rat, rabbit, dog, livestock, or non-human mammal or primate. In some embodiments, processes for modifying the germ line genetic identity of human beings and/or processes for modifying the genetic identity of animals which are likely to cause them suffering without any substantial medical benefit to man or animal, and also animals resulting from such processes, may be excluded. In general, codon optimization refers to a process of modifying a nucleic acid sequence for enhanced expression in the host cells of interest by replacing at least one codon (e.g., about or more than about 1, 2, 3, 4, 5, 10, 15, 20, 25, 50, or more codons) of the native sequence with codons that are more frequently or most frequently used in the genes of that host cell while maintaining the native amino acid sequence. Various species exhibit particular bias for certain codons of a particular amino acid. Codon bias (differences in codon usage between organisms) often correlates with the efficiency of translation of messenger RNA (mRNA), which is in turn believed to be dependent on, among other things, the properties of the codons being translated and the availability of particular transfer RNA (tRNA) molecules. The predominance of selected tRNAs in a cell is generally a reflection of the codons used most frequently in peptide synthesis. Accordingly, genes can be tailored for optimal gene expression in a given organism based on codon optimization. Codon usage tables are readily available, for example, at the “Codon Usage Database” available at www.kazusa.orjp/codon/and these tables can be adapted in a number of ways. See Nakamura, Y., et al. “Codon usage tabulated from the international DNA sequence databases: status for the year 2000” Nucl. Acids Res. 28:292 (2000). Computer algorithms for codon optimizing a particular sequence for expression in a particular host cell are also available, such as Gene Forge (Aptagen; Jacobus, Pa.), are also available. In some embodiments, one or more codons (e.g., 1, 2, 3, 4, 5, 10, 15, 20, 25, 50, or more, or all codons) in a sequence encoding a DNA/RNA-targeting Cas protein corresponds to the most frequently used codon for a particular amino acid. As to codon usage in yeast, reference is made to the online Yeast Genome database available at www.yeastgenome.org/community/codon_usage.shtml, or Codon selection in yeast, Bennetzen and Hall, J Biol Chem. 1982 March 25; 257(6):3026-31. As to codon usage in plants including algae, reference is made to Codon usage in higher plants, green algae, and cyanobacteria, Campbell and Gowri, Plant Physiol. 1990 January; 92(1): 1-11; as well as Codon usage in plant genes, Murray et al, Nucleic Acids Res. 1989 Jan. 25; 17(2):477-98; or Selection on the codon bias of chloroplast and cyanelle genes in different plant and algal lineages, Morton B R, J Mol Evol. 1998 April; 46(4):449-59.

### Guide Molecules

[0169] As used herein, the term “crRNA” or “guide RNA” or “single guide RNA” or “sgRNA” or “one or more nucleic acid components” of a Type V or Type VI CRISPR-Cas locus effector protein, comprises any polynucleotide sequence having sufficient complementarity with a target nucleic acid sequence to hybridize with the target nucleic acid sequence and direct sequence-specific binding of a nucleic acid-targeting complex to the target nucleic acid sequence, the degree of complementarity, when optimally aligned using a suitable alignment algorithm, is about or more than about 50%, 60%, 75%, 80%, 85%, 90%, 95%, 97.5%, 99%, or more. Optimal alignment may be determined with the use of any suitable algorithm for aligning sequences, non-limiting example of which include the Smith-Waterman algorithm, the Needleman-Wunsch algorithm, algorithms based on the Burrows-Wheeler Transform (e.g., the Burrows Wheeler Aligner), ClustalW, Clustal X, BLAT, Novoalign (Novocraft Technologies; available at www.novocraft.com), ELAND (Illumina, San Diego, Calif.), SOAP (available at soap.genomics.org.cn), and Maq (available at maq.sourceforge.net). The ability of a guide sequence (within a nucleic acid-targeting guide RNA) to direct sequence-specific binding of a nucleic acid-targeting complex to a target nucleic acid sequence may be assessed by any suitable assay. For example, the components of a nucleic acid-targeting CRISPR system sufficient to form a nucleic acid-targeting complex, including the guide sequence to be tested, may be provided to a host cell having the corresponding target nucleic acid sequence, such as by transfection with vectors encoding the components of the nucleic acid-targeting complex, followed by an assessment of preferential targeting (e.g., cleavage) within the target nucleic acid sequence, such as by Surveyor assay as described herein. Similarly, cleavage of a target nucleic acid sequence may be evaluated in a test tube by providing the target nucleic acid sequence, components of a nucleic acid-targeting complex, including the guide sequence to be tested and a control guide sequence different from the test guide sequence, and comparing binding or rate of cleavage at the target sequence between the test and control guide sequence reactions. Other assays are possible, and will occur to those skilled in the art. A guide sequence, and hence a nucleic acid-targeting guide may be selected to target any target nucleic acid sequence. The target sequence may be DNA. The target sequence may be any RNA sequence. In some embodiments, the target sequence may be a sequence within a RNA molecule selected from the group consisting of messenger RNA (mRNA), pre-mRNA, ribosomal RNA (rRNA), transfer RNA (tRNA), micro-RNA (miRNA), small interfering RNA (siRNA), small nuclear RNA (snRNA), small nucleolar RNA (snoRNA), double stranded RNA (dsRNA), non-coding RNA (ncRNA), long non-coding RNA (incRNA), and small cytoplasmatic RNA (scRNA). In some preferred embodiments, the target sequence may be a sequence within a RNA molecule selected from the group consisting of mRNA, pre-mRNA, and rRNA. In some preferred embodiments, the target sequence may be a sequence within a RNA molecule selected from the group consisting of ncRNA, and lncRNA. In some more preferred embodiments, the target sequence may be a sequence within an mRNA molecule or a pre-mRNA molecule. In the context of deaminase conjugates the target nucleic acid sequence or target sequence is the sequence comprising the target adenosine to be deaminated also referred to herein as the “target adenosine”. In some embodiments, the complementarity described herein above excludes an intended mismatch, such as the dA-C mismatch described herein. The guide sequence may hybridize to a target DNA sequence in a prokaryotic cell. The guide sequence may hybridize to a target DNA sequence in a eukaryotic cell.

[0170] In some embodiments, a nucleic acid-targeting guide is selected to reduce the degree secondary structure within the nucleic acid-targeting guide. In some embodiments, about or less than about 75%, 50%, 40%, 30%, 25%, 20%, 15%, 10%, 5%, 1%, or fewer of the nucleotides of the nucleic acid-targeting guide participate in self-complementary base pairing when optimally folded. Optimal folding may be determined by any suitable polynucleotide folding algorithm. Some programs are based on calculating the minimal Gibbs free energy. An example of one such algorithm is mFold, as described by Zuker and Stiegler (Nucleic Acids Res. 9 (1981), 133-148). Another example folding algorithm is the online webserver RNAfold, developed at Institute for Theoretical Chemistry at the University of Vienna, using the centroid structure prediction algorithm (see e.g., A. R. Gruber et al., 2008, Cell 106(1): 23-24; and P A Carr and G M Church, 2009, Nature Biotechnology 27(12): 1151-62).

[0171] In certain embodiments, a guide RNA or crRNA may comprise, consist essentially of, or consist of a direct repeat (DR) sequence and a guide sequence or spacer sequence. In certain embodiments, the guide RNA or crRNA may comprise, consist essentially of, or consist of a direct repeat sequence fused or linked to a guide sequence or spacer sequence. In certain embodiments, the direct repeat sequence may be located upstream (i.e., 5′) from the guide sequence or spacer sequence. In other embodiments, the direct repeat sequence may be located downstream (i.e., 3′) from the guide sequence or spacer sequence.

[0172] In some embodiments, the guide molecule comprises a guide sequence that is designed to have at least one mismatch with the target sequence, such that a heteroduplex formed between the guide sequence and the target sequence comprises a non-pairing C in the guide sequence opposite to the target A for deamination on the target sequence. In some embodiments, aside from this A-C mismatch, the degree of complementarity, when optimally aligned using a suitable alignment algorithm, is about or more than about 50%, 60%, 75%, 80%, 85%, 90%, 95%, 97.5%, 99%, or more.

[0173] In certain embodiments, the guide sequence or spacer length of the guide molecules is from 10 to 50 nt, more particularly from 15 to 35 nt in length. In certain embodiments, the spacer length of the guide RNA is at least 15 nucleotides. In certain embodiments, the spacer length is from 10 to 15 nt, e.g. 10, 11, 12, 13, 14, 14, from 15 to 17 nt, e.g., 15, 16, or 17 nt, from 17 to 20 nt, e.g., 17, 18, 19, or 20 nt, from 20 to 24 nt, e.g., 20, 21, 22, 23, or 24 nt, from 23 to 25 nt, e.g., 23, 24, or 25 nt, from 24 to 27 nt, e.g., 24, 25, 26, or 27 nt, from 27-30 nt, e.g., 27, 28, 29, or 30 nt, from 30-35 nt, e.g., 30, 31, 32, 33, 34, or 35 nt, or 35 nt or longer. In certain example embodiment, the guide sequence is 15, 16, 17, 18, 19, 20, 21, 22, 23, 24, 25, 26, 27, 28, 29, 30, 31, 32, 33, 34, 35, 36, 37, 38, 39 40, 41, 42, 43, 44, 45, 46, 47 48, 49, 50, 51, 52, 53, 54, 55, 56, 57, 58, 59, 60, 61, 62, 63, 64, 65, 66, 67, 68, 69, 70, 71, 72, 73, 74, 75, 76, 77, 78, 79, 80, 81, 82, 83, 84, 85, 86, 87, 88, 89, 90, 91, 92, 93, 94, 95, 96, 97, 98, 99, or 100nt.

[0174] In some embodiments of CRISPR-Cas systems, the degree of complementarity between a guide sequence and its corresponding target sequence can be about or more than about 50%, 60%, 75%, 80%, 85%, 90%, 95%, 97.5%, 99%, or 100%; a guide or RNA or sgRNA can be about or more than about 5, 10, 11, 12, 13, 14, 15, 16, 17, 18, 19, 20, 21, 22, 23, 24, 25, 26, 27, 28, 29, 30, 35, 40, 45, 50, 75, or more nucleotides in length; or guide or RNA or sgRNA can be less than about 75, 50, 45, 40, 35, 30, 25, 20, 15, 12, or fewer nucleotides in length; and advantageously tracr RNA is 30 or 50 nucleotides in length. However, an aspect of the invention is to reduce off-target interactions, e.g., reduce the guide interacting with a target sequence having low complementarity. Indeed, in the examples, it is shown that the invention involves mutations that result in the CRISPR-Cas system being able to distinguish between target and off-target sequences that have greater than 80% to about 95% complementarity, e.g., 83%-84% or 88-89% or 94-95% complementarity (for instance, distinguishing between a target having 18 nucleotides from an off-target of 18 nucleotides having 1, 2 or 3 mismatches). Accordingly, in the context of the present invention the degree of complementarity between a guide sequence and its corresponding target sequence is greater than 94.5% or 95% or 95.5% or 96% or 96.5% or 97% or 97.5% or 98% or 98.5% or 99% or 99.5% or 99.9%, or 100%. Off target is less than 100% or 99.9% or 99.5% or 99% or 99% or 98.5% or 98% or 97.5% or 97% or 96.5% or 96% or 95.5% or 95% or 94.5% or 94% or 93% or 92% or 91% or 90% or 89% or 88% or 87% or 86% or 85% or 84% or 83% or 82% or 81% or 80% complementarity between the sequence and the guide, with it advantageous that off target is 100% or 99.9% or 99.5% or 99% or 99% or 98.5% or 98% or 97.5% or 97% or 96.5% or 96% or 95.5% or 95% or 94.5% complementarity between the sequence and the guide.

[0175] In particularly preferred embodiments according to the invention, the guide RNA (capable of guiding Cas to a target locus) may comprise (1) a guide sequence capable of hybridizing to a genomic target locus in the eukaryotic cell; (2) a tracr sequence; and (3) a tracr mate sequence. All (1) to (3) may reside in a single RNA, i.e. an sgRNA (arranged in a 5′ to 3′ orientation), or the tracr RNA may be a different RNA than the RNA containing the guide and tracr sequence. The tracr hybridizes to the tracr mate sequence and directs the CRISPR/Cas complex to the target sequence. Where the tracr RNA is on a different RNA than the RNA containing the guide and tracr sequence, the length of each RNA may be optimized to be shortened from their respective native lengths, and each may be independently chemically modified to protect from degradation by cellular RNase or otherwise increase stability.

[0176] The “tracrRNA” sequence or analogous terms includes any polynucleotide sequence that has sufficient complementarity with a crRNA sequence to hybridize. In some embodiments, the degree of complementarity between the tracrRNA sequence and crRNA sequence along the length of the shorter of the two when optimally aligned is about or more than about 25%, 30%, 40%, 50%, 60%, 70%, 80%, 90%, 95%, 97.5%, 99%, or higher. In some embodiments, the tracr sequence is about or more than about 5, 6, 7, 8, 9, 10, 11, 12, 13, 14, 15, 16, 17, 18, 19, 20, 25, 30, 40, 50, or more nucleotides in length. In some embodiments, the tracr sequence and crRNA sequence are contained within a single transcript, such that hybridization between the two produces a transcript having a secondary structure, such as a hairpin. In an embodiment of the invention, the transcript or transcribed polynucleotide sequence has at least two or more hairpins. In preferred embodiments, the transcript has two, three, four or five hairpins. In a further embodiment of the invention, the transcript has at most five hairpins. In a hairpin structure the portion of the sequence 5′ of the final “N” and upstream of the loop corresponds to the tracr mate sequence, and the portion of the sequence 3′ of the loop corresponds to the tracr sequence. In some embodiments, the systems comprise one or more crRNAs. For example, the systems may comprise two or more crRNAs.

[0177] In general, degree of complementarity is with reference to the optimal alignment of the guide sequence and tracr sequence, along the length of the shorter of the two sequences. Optimal alignment may be determined by any suitable alignment algorithm, and may further account for secondary structures, such as self-complementarity within either the sca sequence or tracr sequence. In some embodiments, the degree of complementarity between the tracr sequence and crRNA sequence along the length of the shorter of the two when optimally aligned is about or more than about 25%, 30%, 40%, 50%, 60%, 70%, 80%, 90%, 95%, 97.5%, 99%, or higher.

[0178] In one aspect of the invention, the guide comprises a modified crRNA for C2c1, having a 5′-handle and a guide segment further comprising a seed region and a 3′-terminus. In some embodiments, the modified guide can be used with a C2c1 of any one of the orthologues listed in Tables 1 and 2.

### Modified Guides

[0179] In certain embodiments, guides of the invention comprise non-naturally occurring nucleic acids and/or non-naturally occurring nucleotides and/or nucleotide analogs, and/or chemically modifications. Non-naturally occurring nucleic acids can include, for example, mixtures of naturally and non-naturally occurring nucleotides. Non-naturally occurring nucleotides and/or nucleotide analogs may be modified at the ribose, phosphate, and/or base moiety. In an embodiment of the invention, a guide nucleic acid comprises ribonucleotides and non-ribonucleotides. In one such embodiment, a guide comprises one or more ribonucleotides and one or more deoxyribonucleotides. In an embodiment of the invention, the guide comprises one or more non-naturally occurring nucleotide or nucleotide analog such as a nucleotide with phosphorothioate linkage, boranophosphate linkage, a locked nucleic acid (LNA) nucleotides comprising a methylene bridge between the 2′ and 4′ carbons of the ribose ring, peptide nucleic acids (PNA), or bridged nucleic acids (BNA). Other examples of modified nucleotides include 2′-O-methyl analogs, 2′-deoxy analogs, 2-thiouridine analogs, N6-methyladenosine analogs, or 2′-fluoro analogs. Further examples of modified nucleotides include linkage of chemical moieties at the 2′ position, including but not limited to peptides, nuclear localization sequence (NLS), peptide nucleic acid (PNA), polyethylene glycol (PEG), triethylene glycol, or tetraethyleneglycol (TEG). Further examples of modified bases include, but are not limited to, 2-aminopurine, 5-bromo-uridine, pseudouridine (Ψ), N1-methylpseudouridine (me1Ψ), 5-methoxyuridine(5moU), inosine, 7-methylguanosine. Examples of guide RNA chemical modifications include, without limitation, incorporation of 2′-O-methyl (M), 2′-O-methyl-3′-phosphorothioate (MS), phosphorothioate (PS), S-constrained ethyl(cEt), 2′-O-methyl-3′-thioPACE (MSP), or 2′-O-methyl-3′-phosphonoacetate (MP) at one or more terminal nucleotides. Such chemically modified guides can comprise increased stability and increased activity as compared to unmodified guides, though on-target vs. off-target specificity is not predictable. (See, Hendel, 2015, Nat Biotechnol. 33(9):985-9, doi: 10.1038/nbt.3290, published online 29 Jun. 2015; Ragdarm et al., 0215, PNAS, E7110-E7111; Allerson et al., J. Med. Chem. 2005, 48:901-904; Bramsen et al., Front. Genet., 2012, 3:154; Deng et al., PNAS, 2015, 112:11870-11875; Sharma et al., MedChemComm., 2014, 5:1454-1471; Hendel et al., Nat. Biotechnol. (2015) 33(9): 985-989; Li et al., Nature Biomedical Engineering, 2017, 1, 0066 DOI:10.1038/s41551-017-0066; Ryan et al., Nucleic Acids Res. (2018) 46(2): 792-803).

[0180] In some embodiments, the modification to the guide is a chemical modification, an insertion, a deletion or a split. In some embodiments, the chemical modification includes, but is not limited to, incorporation of 2′-O-methyl (M) analogs, 2′-deoxy analogs, 2-thiouridine analogs, N6-methyladenosine analogs, 2′-fluoro analogs, 2-aminopurine, 5-bromo-uridine, pseudouridine (Ψ), N1-methylpseudouridine (me1Ψ), 5-methoxyuridine(5moU), inosine, 7-methylguanosine, 2′-O-methyl-3′-phosphorothioate (MS), S-constrained ethyl(cEt), phosphorothioate (PS), 2′-O-methyl-3′-thioPACE (MSP), or 2′-O-methyl-3′-phosphonoacetate (MP). In some embodiments, the guide comprises one or more of phosphorothioate modifications. In certain embodiments, at least 1, 2, 3, 4, 5, 6, 7, 8, 9, 10, 11, 12, 13, 14, 15, 16, 17, 18, 19, 20, or 25 nucleotides of the guide are chemically modified. In some embodiments, all nucleotides are chemically modified. In certain embodiments, one or more nucleotides in the seed region are chemically modified. In certain embodiments, one or more nucleotides in the 3′-terminus are chemically modified. In certain embodiments, none of the nucleotides in the 5′-handle is chemically modified. In some embodiments, the chemical modification in the seed region is a minor modification, such as incorporation of a 2′-fluoro analog. In a specific embodiment, one nucleotide of the seed region is replaced with a 2′-fluoro analog. In some embodiments, 5 or 10 nucleotides in the 3′-terminus are chemically modified. Such chemical modifications at the 3′-terminus of the Cpf1 CrRNA improve gene cutting efficiency (see Li, et al., Nature Biomedical Engineering, 2017, 1:0066). In a specific embodiment, 5 nucleotides in the 3′-terminus are replaced with 2′-fluoro analogues. In a specific embodiment, 10 nucleotides in the 3′-terminus are replaced with 2′-fluoro analogues. In a specific embodiment, 5 nucleotides in the 3′-terminus are replaced with 2′-O-methyl (M) analogs. In some embodiments, 3 nucleotides at each of the 3′ and 5′ ends are chemically modified. In a specific embodiment, the modifications comprise 2′-O-methyl or phosphorothioate analogs. In a specific embodiment, 12 nucleotides in the tetraloop and 16 nucleotides in the stem-loop region are replaced with 2′-O-methyl analogs. Such chemical modifications improve in vivo editing and stability (see Finn et al., Cell Reports (2018), 22: 2227-2235).

[0181] In some embodiments, the 5′ and/or 3′ end of a guide RNA is modified by a variety of functional moieties including fluorescent dyes, polyethylene glycol, cholesterol, proteins, or detection tags. (See Kelly et al., 2016, J. Biotech. 233:74-83). In certain embodiments, a guide comprises ribonucleotides in a region that binds to a target DNA and one or more deoxyribonucletides and/or nucleotide analogs in a region that binds to Cas9, Cpf1, or C2c1. In an embodiment of the invention, deoxyribonucleotides and/or nucleotide analogs are incorporated in engineered guide structures, such as, without limitation, 5′ and/or 3′ end, stem-loop regions, and the seed region. In certain embodiments, the modification is not in the 5′-handle of the stem-loop regions. Chemical modification in the 5′-handle of the stem-loop region of a guide may abolish its function (see Li, et al., Nature Biomedical Engineering, 2017, 1:0066). In certain embodiments, at least 1, 2, 3, 4, 5, 6, 7, 8, 9, 10, 11, 12, 13, 14, 15, 16, 17, 18, 19, 20, 21, 22, 23, 24, 25, 26, 27, 28, 29, 30, 35, 40, 45, 50, or 75 nucleotides of a guide is chemically modified. In some embodiments, 3-5 nucleotides at either the 3′ or the 5′ end of a guide is chemically modified. In some embodiments, only minor modifications are introduced in the seed region, such as 2′-F modifications. In some embodiments, 2′-F modification is introduced at the 3′ end of a guide. In certain embodiments, three to five nucleotides at the 5′ and/or the 3′ end of the guide are chemically modified with 2′-O-methyl (M), 2′-O-methyl-3′-phosphorothioate (MS), S-constrained ethyl(cEt), 2′-O-methyl-3′-thioPACE (MSP), or 2′-O-methyl-3′-phosphonoacetate (MP). Such modification can enhance genome editing efficiency (see Hendel et al., Nat. Biotechnol. (2015) 33(9): 985-989; Ryan et al., Nucleic Acids Res. (2018) 46(2): 792-803). In certain embodiments, all of the phosphodiester bonds of a guide are substituted with phosphorothioates (PS) for enhancing levels of gene disruption. In certain embodiments, more than five nucleotides at the 5′ and/or the 3′ end of the guide are chemically modified with 2′-O-Me, 2′-F or S-constrained ethyl(cEt). Such chemically modified guide can mediate enhanced levels of gene disruption (see Ragdarm et al., 0215, PNAS, E7110-E7111). In an embodiment of the invention, a guide is modified to comprise a chemical moiety at its 3′ and/or 5′ end. Such moieties include, but are not limited to amine, azide, alkyne, thio, dibenzocyclooctyne (DBCO), Rhodamine, peptides, nuclear localization sequence (NLS), peptide nucleic acid (PNA), polyethylene glycol (PEG), triethylene glycol, or tetraethyleneglycol (TEG). In certain embodiment, the chemical moiety is conjugated to the guide by a linker, such as an alkyl chain. In certain embodiments, the chemical moiety of the modified guide can be used to attach the guide to another molecule, such as DNA, RNA, protein, or nanoparticles. Such chemically modified guide can be used to identify or enrich cells generically edited by a CRISPR system (see Lee et al., eLife, 2017, 6:e25312, DOI:10.7554). In some embodiments, 3 nucleotides at each of the 3′ and 5′ ends are chemically modified. In a specific embodiment, the modifications comprise 2′-O-methyl or phosphorothioate analogs. In a specific embodiment, 12 nucleotides in the tetraloop and 16 nucleotides in the stem-loop region are replaced with 2′-O-methyl analogs. Such chemical modifications improve in vivo editing and stability (see Finn et al., Cell Reports (2018), 22: 2227-2235). In some embodiments, more than 60 or 70 nucleotides of the guide are chemically modified. In some embodiments, this modification comprises replacement of nucleotides with 2′-O-methyl or 2′-fluoro nucleotide analogs or phosphorothioate (PS) modification of phosphodiester bonds. In some embodiments, the chemical modification comprises 2′-O-methyl or 2′-fluoro modification of guide nucleotides extending outside of the nuclease protein when the CRISPR complex is formed or PS modification of 20 to 30 or more nucleotides of the 3′-terminus of the guide. In a particular embodiment, the chemical modification further comprises 2′-O-methyl analogs at the 5′ end of the guide or 2′-fluoro analogs in the seed and tail regions. Such chemical modifications improve stability to nuclease degradation and maintain or enhance genome-editing activity or efficiency, but modification of all nucleotides may abolish the function of the guide (see Yin et al., Nat. Biotech. (2018), 35(12): 1179-1187). Such chemical modifications may be guided by knowledge of the structure of the CRISPR complex, including knowledge of the limited number of nuclease and RNA 2′-OH interactions (see Yin et al., Nat. Biotech. (2018), 35(12): 1179-1187). In some embodiments, one or more guide RNA nucleotides may be replaced with DNA nucleotides. In some embodiments, up to 2, 4, 6, 8, 10, or 12 RNA nucleotides of the 5′-end tail/seed guide region are replaced with DNA nucleotides. In certain embodiments, the majority of guide RNA nucleotides at the 3′ end are replaced with DNA nucleotides. In particular embodiments, 16 guide RNA nucleotides at the 3′ end are replaced with DNA nucleotides. In particular embodiments, 8 guide RNA nucleotides of the 5′-end tail/seed region and 16 RNA nucleotides at the 3′ end are replaced with DNA nucleotides. In particular embodiments, guide RNA nucleotides that extend outside of the nuclease protein when the CRISPR complex is formed are replaced with DNA nucleotides. Such replacement of multiple RNA nucleotides with DNA nucleotides leads to decreased off-target activity but similar on-target activity compared to an unmodified guide; however, replacement of all RNA nucleotides at the 3′ end may abolish the function of the guide (see Yin et al., Nat. Chem. Biol. (2018) 14, 311-316). Such modifications may be guided by knowledge of the structure of the CRISPR complex, including knowledge of the limited number of nuclease and RNA 2′-OH interactions (see Yin et al., Nat. Chem. Biol. (2018) 14, 311-316).

[0182] A guide sequence, and hence a nucleic acid-targeting guide RNA may be selected to target any target nucleic acid sequence. The target sequence may be DNA. The target sequence may be genomic DNA. The target sequence may be mitochondrial DNA. The guide molecule or guide RNA of a Class 2 type V CRISPR-Cas protein comprises a tracr-mate sequence (encompassing a “direct repeat” in the context of an endogenous CRISPR system) and a guide sequence (also referred to as a “spacer” in the context of an endogenous CRISPR system). Native Cas12b CRISPR-Cas systems employ tracr sequences.

[0183] In certain embodiments, the guide molecule (capable of guiding C2c1 to a target locus) comprises (1) a guide sequence capable of hybridizing to a target locus and (2) a tracr mate or direct repeat sequence whereby the direct repeat sequence is located upstream (i.e., 5′) from the guide sequence. In a particular embodiment the seed sequence (i.e. the sequence essential critical for recognition and/or hybridization to the sequence at the target locus) of the C2c1 guide sequence is approximately within the first 10 nucleotides of the guide sequence. In particular embodiments, the seed sequence is approximately within the first 5 nt on the 5′ end of the guide sequence.

[0184] In some embodiments, the loop of the 5′-handle of the guide is modified. In some embodiments, the loop of the 5′-handle of the guide is modified to have a deletion, an insertion, a split, or chemical modifications. In certain embodiments, the modified loop comprises 3, 4, or 5 nucleotides. In certain embodiments, the loop comprises the sequence of UCUU, UUUU, UAUU, or UGUU. In some embodiments, the guide molecule forms a stemloop with a separate non-covalently linked sequence, which can be DNA or RNA.

### Stem Loops & Hairpins

[0185] In relation to a nucleic acid-targeting complex or system preferably, the crRNA sequence and the chimeric guide sequence can comprise one or more stem loops or hairpins. The use of an aptamer-modified guide allows for binding of adaptor-containing protein to the guide. The adaptor may be fused to any functional domain, thus providing for attachment of the functional domain to the guide. The use of two different aptamers allows separate targeting by two guides. A large number of such modified nucleic acid-targeting guide RNAs can be used all at the same time, for example 10 or 20 or 30 and so forth, while only one (or at least a minimal number) of effector protein molecules need to be delivered, as a comparatively small number of com protein molecules can be used with a large number modified guides. The fusion between the adaptor protein and a functional domain such as an activator or repressor may include a linker. For example, GlySer linkers GGGS can be used. They can be used in repeats of 3 (GGGGS)₃ (SEQ ID NO:393) or 6 (SEQ ID NO:394), 9 (SEQ ID NO:395), or even 12 (SEQ ID NO:396) or more, to provide suitable lengths, as required. Linkers can be used between the guide RNAs and the functional domain (activator or repressor), or between the nucleic acid-targeting Cas protein (Cas) and the functional domain (activator or repressor). The linkers the user to engineer appropriate amounts of “mechanical flexibility”.

[0186] In particular embodiments, the stem comprises at least about 4 bp comprising complementary X and Y sequences, although stems of more, e.g., 5, 6, 7, 8, 9, 10, 11 or 12 or fewer, e.g., 3, 2, base pairs are also contemplated. Thus, for example X2-10 and Y2-10 (wherein X and Y represent any complementary set of nucleotides) may be contemplated. In one aspect, the stem made of the X and Y nucleotides, together with the loop will form a complete hairpin in the overall secondary structure; and, this may be advantageous and the amount of base pairs can be any amount that forms a complete hairpin. In one aspect, any complementary X:Y base-pairing sequence (e.g., as to length) is tolerated, so long as the secondary structure of the entire guide molecule is preserved. In one aspect, the loop that connects the stem made of X:Y basepairs can be any sequence of the same length (e.g., 4 or 5 nucleotides) or longer that does not interrupt the overall secondary structure of the guide molecule. In one aspect, the stemloop can further comprise, e.g. an MS2 aptamer. In one aspect, the stem comprises about 5-7 bp comprising complementary X and Y sequences, although stems of more or fewer basepairs are also contemplated. In one aspect, non-Watson Crick basepairing is contemplated, where such pairing otherwise generally preserves the architecture of the stem-loop at that position.

[0187] In particular embodiments a natural hairpin or stem-loop structure of the guide molecule is extended or replaced by an extended stem-loop. It has been demonstrated in certain cases that extension of the stem can enhance the assembly of the guide molecule with the CRISPR-Cas protein (Chen et al. Cell. (2013); 155(7): 1479-1491). In particular embodiments the stem of the stemloop is extended by at least 1, 2, 3, 4, 5 or more complementary basepairs (i.e. corresponding to the addition of 2, 4, 6, 8, 10 or more nucleotides in the guide molecule). In particular embodiments these are located at the end of the stem, adjacent to the loop of the stemloop.

[0188] In some embodiments, the guide molecule forms a stem loop with a separate non-covalently linked sequence, which can be DNA or RNA. In particular embodiments, the sequences forming the guide are first synthesized using the standard phosphoramidite synthetic protocol (Herdewijn, P., ed., Methods in Molecular Biology Col 288, Oligonucleotide Synthesis: Methods and Applications, Humana Press, New Jersey (2012)). In some embodiments, these sequences can be functionalized to contain an appropriate functional group for ligation using the standard protocol known in the art (Hermanson, G. T., Bioconjugate Techniques, Academic Press (2013)). Examples of functional groups include, but are not limited to, hydroxyl, amine, carboxylic acid, carboxylic acid halide, carboxylic acid active ester, aldehyde, carbonyl, chlorocarbonyl, imidazolylcarbonyl, hydrozide, semicarbazide, thio semicarbazide, thiol, maleimide, haloalkyl, sufonyl, ally, propargyl, diene, alkyne, and azide. Once this sequence is functionalized, a covalent chemical bond or linkage can be formed between this sequence and the direct repeat sequence. Examples of chemical bonds include, but are not limited to, those based on carbamates, ethers, esters, amides, imines, amidines, aminotrizines, hydrozone, disulfides, thioethers, thioesters, phosphorothioates, phosphorodithioates, sulfonamides, sulfonates, fulfones, sulfoxides, ureas, thioureas, hydrazide, oxime, triazole, photolabile linkages, C—C bond forming groups such as Diels-Alder cyclo-addition pairs or ring-closing metathesis pairs, and Michael reaction pairs.

[0189] In some embodiments, these stem-loop forming sequences can be chemically synthesized. In some embodiments, the chemical synthesis uses automated, solid-phase oligonucleotide synthesis machines with 2′-acetoxyethyl orthoester (2′-ACE) (Scaringe et al., J. Am. Chem. Soc. (1998) 120: 11820-11821; Scaringe, Methods Enzymol. (2000) 317: 3-18) or 2′-thionocarbamate (2′-TC) chemistry (Dellinger et al., J. Am. Chem. Soc. (2011) 133: 11540-11546; Hendel et al., Nat. Biotechnol. (2015) 33:985-989).

### Reduced RNase Susceptibility

[0190] In some embodiments, it is of interest to reduce the susceptibility of the guide molecule to RNA cleavage, such as to cleavage by Cas12b. Accordingly, in particular embodiments, the guide molecule is adjusted to avoid cleavage by Cas12b or other RNA-cleaving enzymes.

[0191] In particular embodiments, the susceptibility of the guide molecule to RNases or to decreased expression can be reduced by slight modifications of the sequence of the guide molecule which do not affect its function. For instance, in particular embodiments, premature termination of transcription, such as premature transcription of U6 Pol-III, can be removed by modifying a putative Pol-III terminator (4 consecutive U's) in the guide molecules sequence. Where such sequence modification is required in the stemloop of the guide molecule, it is preferably ensured by a basepair flip.

### Reduced Secondary Structure

[0192] In some embodiments, the sequence of the guide molecule (direct repeat and/or spacer) is selected to reduce the degree secondary structure within the guide molecule. In some embodiments, about or less than about 75%, 50%, 40%, 30%, 25%, 20%, 15%, 10%, 5%, 1%, or fewer of the nucleotides of the nucleic acid-targeting guide RNA participate in self-complementary base pairing when optimally folded. Optimal folding may be determined by any suitable polynucleotide folding algorithm. Some programs are based on calculating the minimal Gibbs free energy. An example of one such algorithm is mFold, as described by Zuker and Stiegler (Nucleic Acids Res. 9 (1981), 133-148). Another example folding algorithm is the online webserver RNAfold, developed at Institute for Theoretical Chemistry at the University of Vienna, using the centroid structure prediction algorithm (see e.g., A. R. Gruber et al., 2008, Cell 106(1): 23-24; and PA Carr and GM Church, 2009, Nature Biotechnology 27(12): 1151-62).

### Conjugated Tracr Sequences

[0193] In some embodiments, the guide molecule comprises a tracr sequence and a tracr mate sequence that are chemically linked or conjugated via a non-phosphodiester bond. In one aspect, the guide comprises a tracr sequence and a tracr mate sequence that are chemically linked or conjugated via a non-nucleotide loop. In some embodiments, the tracr and tracr mate sequences are joined via a non-phosphodiester covalent linker. Examples of the covalent linker include but are not limited to a chemical moiety selected from the group consisting of carbamates, ethers, esters, amides, imines, amidines, aminotrizines, hydrozone, disulfides, thioethers, thioesters, phosphorothioates, phosphorodithioates, sulfonamides, sulfonates, fulfones, sulfoxides, ureas, thioureas, hydrazide, oxime, triazole, photolabile linkages, C—C bond forming groups such as Diels-Alder cyclo-addition pairs or ring-closing metathesis pairs, and Michael reaction pairs.

[0194] In some embodiments, the tracr and tracr mate sequences are first synthesized using the standard phosphoramidite synthetic protocol (Herdewijn, P., ed., Methods in Molecular Biology Col 288, Oligonucleotide Synthesis: Methods and Applications, Humana Press, New Jersey (2012)). In some embodiments, the tracr or tracr mate sequences can be functionalized to contain an appropriate functional group for ligation using the standard protocol known in the art (Hermanson, G. T., Bioconjugate Techniques, Academic Press (2013)). Examples of functional groups include, but are not limited to, hydroxyl, amine, carboxylic acid, carboxylic acid halide, carboxylic acid active ester, aldehyde, carbonyl, chlorocarbonyl, imidazolylcarbonyl, hydrozide, semicarbazide, thio semicarbazide, thiol, maleimide, haloalkyl, sufonyl, ally, propargyl, diene, alkyne, and azide. Once the tracr and the tracr mate sequences are functionalized, a covalent chemical bond or linkage can be formed between the two oligonucleotides. Examples of chemical bonds include, but are not limited to, those based on carbamates, ethers, esters, amides, imines, amidines, aminotrizines, hydrozone, disulfides, thioethers, thioesters, phosphorothioates, phosphorodithioates, sulfonamides, sulfonates, fulfones, sulfoxides, ureas, thioureas, hydrazide, oxime, triazole, photolabile linkages, C—C bond forming groups such as Diels-Alder cyclo-addition pairs or ring-closing metathesis pairs, and Michael reaction pairs.

[0195] In some embodiments, the tracr and tracr mate sequences can be chemically synthesized. In some embodiments, the chemical synthesis uses automated, solid-phase oligonucleotide synthesis machines with 2′-acetoxyethyl orthoester (2′-ACE) (Scaringe et al., J. Am. Chem. Soc. (1998) 120: 11820-11821; Scaringe, Methods Enzymol. (2000) 317: 3-18) or 2′-thionocarbamate (2′-TC) chemistry (Dellinger et al., J. Am. Chem. Soc. (2011) 133: 11540-11546; Hendel et al., Nat. Biotechnol. (2015) 33:985-989).

[0196] In some embodiments, the tracr and tracr mate sequences can be covalently linked using various bioconjugation reactions, loops, bridges, and non-nucleotide links via modifications of sugar, internucleotide phosphodiester bonds, purine and pyrimidine residues. Sletten et al., Angew. Chem. Int. Ed. (2009) 48:6974-6998; Manoharan, M. Curr. Opin. Chem. Biol. (2004) 8: 570-9; Behlke et al., Oligonucleotides (2008) 18: 305-19; Watts, et al., Drug. Discov. Today (2008) 13: 842-55; Shukla, et al., ChemMedChem (2010) 5: 328-49.

[0197] In some embodiments, the tracr and tracr mate sequences can be covalently linked using click chemistry. In some embodiments, the tracr and tracr mate sequences can be covalently linked using a triazole linker. In some embodiments, the tracr and tracr mate sequences can be covalently linked using Huisgen 1,3-dipolar cycloaddition reaction involving an alkyne and azide to yield a highly stable triazole linker (He et al., ChemBioChem (2015) 17: 1809-1812; WO 2016/186745). In some embodiments, the tracr and tracr mate sequences are covalently linked by ligating a 5′-hexyne tracrRNA and a 3′-azide crRNA. In some embodiments, either or both of the 5′-hexyne tracrRNA and a 3′-azide crRNA can be protected with 2′-acetoxyethl orthoester (2′-ACE) group, which can be subsequently removed using Dharmacon protocol (Scaringe et al., J. Am. Chem. Soc. (1998) 120: 11820-11821; Scaringe, Methods Enzymol. (2000) 317: 3-18).

[0198] In some embodiments, the tracr and tracr mate sequences can be covalently linked via a linker (e.g., a non-nucleotide loop) that comprises a moiety such as spacers, attachments, bioconjugates, chromophores, reporter groups, dye labeled RNAs, and non-naturally occurring nucleotide analogues. More specifically, suitable spacers for purposes of this invention include, but are not limited to, polyethers (e.g., polyethylene glycols, polyalcohols, polypropylene glycol or mixtures of efhylene and propylene glycols), polyamines group (e.g., spennine, spermidine and polymeric derivatives thereof), polyesters (e.g., poly(ethyl acrylate)), polyphosphodiesters, alkylenes, and combinations thereof. Suitable attachments include any moiety that can be added to the linker to add additional properties to the linker, such as but not limited to, fluorescent labels. Suitable bioconjugates include, but are not limited to, peptides, glycosides, lipids, cholesterol, phospholipids, diacyl glycerols and dialkyl glycerols, fatty acids, hydrocarbons, enzyme substrates, steroids, biotin, digoxigenin, carbohydrates, polysaccharides. Suitable chromophores, reporter groups, and dye-labeled RNAs include, but are not limited to, fluorescent dyes such as fluorescein and rhodamine, chemiluminescent, electrochemiluminescent, and bioluminescent marker compounds. The design of example linkers conjugating two RNA components are also described in WO 2004/015075.

[0199] The linker (e.g., a non-nucleotide loop) can be of any length. In some embodiments, the linker has a length equivalent to about 0-16 nucleotides. In some embodiments, the linker has a length equivalent to about 0-8 nucleotides. In some embodiments, the linker has a length equivalent to about 0-4 nucleotides. In some embodiments, the linker has a length equivalent to about 2 nucleotides. Example linker design is also described in WO2011/008730.

[0200] A typical Cas9 sgRNA comprises (in 5′ to 3′ direction): a guide sequence, a poly U tract, a first complimentary stretch (the “repeat”), a loop (tetraloop), a second complimentary stretch (the “anti-repeat” being complimentary to the repeat), a stem, and further stem loops and stems and a poly A (often poly U in RNA) tail (terminator). A typical Cas12b sgRNA comprises similar components, but in the opposite orientation, i.e., the 3′ to 5′ direction. A direct repeat (DR) hybridizes with tracrRNA to form a crRNA:tracrRNA duplex, which is then loaded onto Cas12b to guide DNA recognition and cleavage. Cas12b recognizes the T-rich PAM at the 5′ end of the protospacer sequence to mediate DNA interference. In certain embodiments, the 5′ end of the tracr forms a stem-loop. In certain embodiments, nucleotides of the tracrRNA and the 5′ DR form a repeat:anti-repeat duplex. In certain embodiments, the sgRNA architecture accords with the structure predicted by Shmakov et al., 2015, Molecular Cell 60, 385-397. In certain embodiments, the sgRNA architecture accords with the structure predicted by Liu et al., 2017, Molecular Cell 65, 310-322 In preferred embodiments, certain aspects of guide architecture are retained, certain aspect of guide architecture cam be modified, for example by addition, subtraction, or substitution of features, whereas certain other aspects of guide architecture are maintained. Preferred locations for engineered sgRNA modifications, including but not limited to insertions, deletions, and substitutions include guide termini and regions of the sgRNA that are exposed when complexed with CRISPR protein and/or target, for example the tetraloop and/or loop2.

[0201] In certain embodiments, guides of the invention comprise specific binding sites (e.g. aptamers) for adapter proteins, which may comprise one or more functional domains (e.g. via fusion protein). When such a guide forms a CRISPR complex (i.e. CRISPR enzyme binding to guide and target) the adapter proteins bind and, the functional domain associated with the adapter protein is positioned in a spatial orientation which is advantageous for the attributed function to be effective. For example, if the functional domain is a transcription activator (e.g. VP64 or p65), the transcription activator is placed in a spatial orientation which allows it to affect the transcription of the target. Likewise, a transcription repressor will be advantageously positioned to affect the transcription of the target and a nuclease (e.g. Fok1) will be advantageously positioned to cleave or partially cleave the target.

[0202] The skilled person will understand that modifications to the guide which allow for binding of the adapter+functional domain but not proper positioning of the adapter+functional domain (e.g. due to steric hindrance within the three dimensional structure of the CRISPR complex) are modifications which are not intended. The one or more modified guide may be modified at the tetra loop, the stem loop 1, stem loop 2, or stem loop 3, as described herein, preferably at either the tetra loop or stem loop 2, and most preferably at both the tetra loop and stem loop 2.

[0203] The repeat:anti repeat duplex will be apparent from the secondary structure of the sgRNA. In a typical Cas9 sgRNA, it may be typically a first complimentary stretch after (in 5′ to 3′ direction) the poly U tract and before the tetraloop; and a second complimentary stretch after (in 5′ to 3′ direction) the tetraloop and before the poly A tract. The first complimentary stretch (the “repeat”) is complimentary to the second complimentary stretch (the “anti-repeat”). In certain embodiments, the architecture of a Cas12b sgRNA accords with the structure predicted by Shmakov et al., 2015, Molecular Cell 60, 385-397. In certain embodiments, the architecture of a Cas12b sgRNA architecture accords with the structure predicted by Liu et al., 2017, Molecular Cell 65, 310-322 As such, they sgRNAs comprise Watson-Crick base pairs to form a duplex of dsRNA when folded back on one another. As such, the anti-repeat sequence is the complimentary sequence of the repeat and in terms to A-U or C-G base pairing, but also in terms of the fact that the anti-repeat is in the reverse orientation due to stem-loops or other architectural feature.

[0204] In an embodiment of the invention, modification of guide architecture comprises replacing bases in stemloop 2. For example, in some embodiments, “actt” (“acuu” in RNA) and “aagt” (“aagu” in RNA) bases in stemloop2 are replaced with “cgcc” and “gcgg”. In some embodiments, “actt” and “aagt” bases in stemloop2 are replaced with complimentary GC-rich regions of 4 nucleotides. In some embodiments, the complimentary GC-rich regions of 4 nucleotides are “cgcc” and “gcgg” (both in 5′ to 3′ direction). In some embodiments, the complimentary GC-rich regions of 4 nucleotides are “gcgg” and “cgcc” (both in 5′ to 3′ direction). Other combination of C and G in the complimentary GC-rich regions of 4 nucleotides will be apparent including CCCC and GGGG.

[0205] In one aspect, the stemloop 2, e.g., “ACTTgtttAAGT” (SEQ ID NO:397) can be replaced by any “XXXXgtttYYYY” (SEQ ID NO:398), e.g., where XXXX and YYYY represent any complementary sets of nucleotides that together will base pair to each other to create a stem.

[0206] In one aspect, the stem comprises at least about 4 bp comprising complementary X and Y sequences, although stems of more, e.g., 5, 6, 7, 8, 9, 10, 11 or 12 or fewer, e.g., 3, 2, base pairs are also contemplated. Thus, for example X2-12 and Y2-12 (wherein X and Y represent any complementary set of nucleotides) may be contemplated. In one aspect, the stem made of the X and Y nucleotides, together with the “gttt,” will form a complete hairpin in the overall secondary structure; and, this may be advantageous and the amount of base pairs can be any amount that forms a complete hairpin. In one aspect, any complementary X:Y basepairing sequence (e.g., as to length) is tolerated, so long as the secondary structure of the entire sgRNA is preserved. In one aspect, the stem can be a form of X:Y basepairing that does not disrupt the secondary structure of the whole sgRNA in that it has a DR:tracr duplex, and 3 stemloops. In one aspect, the “gttt” tetraloop that connects ACTT and AAGT (or any alternative stem made of X:Y basepairs) can be any sequence of the same length (e.g., 4 basepair) or longer that does not interrupt the overall secondary structure of the sgRNA. In one aspect, the stemloop can be something that further lengthens stemloop2, e.g. can be MS2 aptamer. In one aspect, the stemloop3 “GGCACCGagtCGGTGC” (SEQ ID NO:399) can likewise take on a “XXXXXXXagtYYYYYYY” (SEQ ID NO:400) form, e.g., wherein X7 and Y7 represent any complementary sets of nucleotides that together will base pair to each other to create a stem. In one aspect, the stem comprises about 7 bp comprising complementary X and Y sequences, although stems of more or fewer basepairs are also contemplated. In one aspect, the stem made of the X and Y nucleotides, together with the “agt”, will form a complete hairpin in the overall secondary structure. In one aspect, any complementary X:Y basepairing sequence is tolerated, so long as the secondary structure of the entire sgRNA is preserved. In one aspect, the stem can be a form of X:Y basepairing that doesn't disrupt the secondary structure of the whole sgRNA in that it has a DR:tracr duplex, and 3 stemloops. In one aspect, the “agt” sequence of the stemloop 3 can be extended or be replaced by an aptamer, e.g., a MS2 aptamer or sequence that otherwise generally preserves the architecture of stemloop3. In one aspect for alternative Stemloops 2 and/or 3, each X and Y pair can refer to any basepair. In one aspect, non-Watson Crick basepairing is contemplated, where such pairing otherwise generally preserves the architecture of the stemloop at that position.

[0207] In one aspect, the DR:tracrRNA duplex can be replaced with the form: gYYYYag(N)NNNNxxxxNNNN(AAN)uuRRRRu (SEQ ID NO:401) (using standard IUPAC nomenclature for nucleotides), wherein (N) and (AAN) represent part of the bulge in the duplex, and “xxxx” represents a linker sequence. NNNN on the direct repeat can be anything so long as it basepairs with the corresponding NNNN portion of the tracrRNA. In one aspect, the DR:tracrRNA duplex can be connected by a linker of any length (xxxx . . . ), any base composition, as long as it doesn't alter the overall structure.

[0208] In one aspect, the sgRNA structural requirement is to have a duplex and 3 stemloops. In most aspects, the actual sequence requirement for many of the particular base requirements are lax, in that the architecture of the DR:tracrRNA duplex should be preserved, but the sequence that creates the architecture, i.e., the stems, loops, bulges, etc., may be altered.

[0209] One guide with a first aptamer/RNA-binding protein pair can be linked or fused to an activator, whilst a second guide with a second aptamer/RNA-binding protein pair can be linked or fused to a repressor. The guides are for different targets (loci), so this allows one gene to be activated and one repressed. For example, the following schematic shows such an approach:

[0210] Guide 1—MS2 aptamer-------MS2 RNA-binding protein-----VP64 activator; and

[0211] Guide 2—PP7 aptamer-------PP7 RNA-binding protein-------SID4x repressor.

[0212] The present invention also relates to orthogonal PP7/MS2 gene targeting. In this example, sgRNA targeting different loci are modified with distinct RNA loops in order to recruit MS2-VP64 or PP7-SID4X, which activate and repress their target loci, respectively. PP7 is the RNA-binding coat protein of the bacteriophage Pseudomonas. Like MS2, it binds a specific RNA sequence and secondary structure. The PP7 RNA-recognition motif is distinct from that of MS2. Consequently, PP7 and MS2 can be multiplexed to mediate distinct effects at different genomic loci simultaneously. For example, an sgRNA targeting locus A can be modified with MS2 loops, recruiting MS2-VP64 activators, while another sgRNA targeting locus B can be modified with PP7 loops, recruiting PP7-SID4X repressor domains. In the same cell, dC2c1 can thus mediate orthogonal, locus-specific modifications. This principle can be extended to incorporate other orthogonal RNA-binding proteins such as Q-beta.

[0213] An alternative option for orthogonal repression includes incorporating non-coding RNA loops with transactive repressive function into the guide (either at similar positions to the MS2/PP7 loops integrated into the guide or at the 3′ terminus of the guide). For instance, guides were designed with non-coding (but known to be repressive) RNA loops (e.g. using the Alu repressor (in RNA) that interferes with RNA polymerase II in mammalian cells). The Alu RNA sequence was located: in place of the MS2 RNA sequences as used herein (e.g. at tetraloop and/or stem loop 2); and/or at 3′ terminus of the guide. This gives possible combinations of MS2, PP7 or Alu at the tetraloop and/or stemloop 2 positions, as well as, optionally, addition of Alu at the 3′ end of the guide (with or without a linker).

[0214] The use of two different aptamers (distinct RNA) allows an activator-adaptor protein fusion and a repressor-adaptor protein fusion to be used, with different guides, to activate expression of one gene, whilst repressing another. They, along with their different guides can be administered together, or substantially together, in a multiplexed approach. A large number of such modified guides can be used all at the same time, for example 10 or 20 or 30 and so forth, whilst only one (or at least a minimal number) of C2c1s to be delivered, as a comparatively small number of C2c1s can be used with a large number modified guides. The adaptor protein may be associated (preferably linked or fused to) one or more activators or one or more repressors. For example, the adaptor protein may be associated with a first activator and a second activator. The first and second activators may be the same, but they are preferably different activators. For example, one might be VP64, whilst the other might be p65, although these are just examples and other transcriptional activators are envisaged. Three or more or even four or more activators (or repressors) may be used, but package size may limit the number being higher than 5 different functional domains. Linkers are preferably used, over a direct fusion to the adaptor protein, where two or more functional domains are associated with the adaptor protein. Suitable linkers might include the GlySer linker.

[0215] It is also envisaged that the enzyme-guide complex as a whole may be associated with two or more functional domains. For example, there may be two or more functional domains associated with the enzyme, or there may be two or more functional domains associated with the guide (via one or more adaptor proteins), or there may be one or more functional domains associated with the enzyme and one or more functional domains associated with the guide (via one or more adaptor proteins).

[0216] The fusion between the adaptor protein and the activator or repressor may include a linker. For example, GlySer linkers GGGS can be used. They can be used in repeats of 3 ((GGGGS)₃) or 6, 9 or even 12 or more, to provide suitable lengths, as required. Linkers can be used between the RNA-binding protein and the functional domain (activator or repressor), or between the CRISPR Enzyme (C2c1) and the functional domain (activator or repressor). The linkers the user to engineer appropriate amounts of “mechanical flexibility”.

### Escorted & Inducible Guides

[0217] In a preferred embodiment the direct repeat may be modified to comprise one or more protein-binding RNA aptamers. In a particular embodiment, one or more aptamers may be included such as part of optimized secondary structure. Such aptamers may be capable of binding a bacteriophage coat protein as detailed further herein.

[0218] In particular embodiment, the guide is an escorted guide. By “escorted” is meant that the Cas12b CRISPR-Cas system or complex or guide is delivered to a selected time or place within a cell, so that activity of the Cas12b CRISPR-Cas system or complex or guide is spatially or temporally controlled. For example, the activity and destination of the Cas12b CRISPR-Cas system or complex or guide may be controlled by an escort RNA aptamer sequence that has binding affinity for an aptamer ligand, such as a cell surface protein or other localized cellular component. Alternatively, the escort aptamer may for example be responsive to an aptamer effector on or in the cell, such as a transient effector, such as an external energy source that is applied to the cell at a particular time.

[0219] The escorted Cas12b CRISPR-Cas systems or complexes have a guide molecule with a functional structure designed to improve guide molecule structure, architecture, stability, genetic expression, or any combination thereof. Such a structure can include an aptamer.

[0220] Aptamers are biomolecules that can be designed or selected to bind tightly to other ligands, for example using a technique called systematic evolution of ligands by exponential enrichment (SELEX; Tuerk C, Gold L: “Systematic evolution of ligands by exponential enrichment: RNA ligands to bacteriophage T4 DNA polymerase.” Science 1990, 249:505-510). Nucleic acid aptamers can for example be selected from pools of random-sequence oligonucleotides, with high binding affinities and specificities for a wide range of biomedically relevant targets, suggesting a wide range of therapeutic utilities for aptamers (Keefe, Anthony D., Supriya Pai, and Andrew Ellington. “Aptamers as therapeutics.” Nature Reviews Drug Discovery 9.7 (2010): 537-550). These characteristics also suggest a wide range of uses for aptamers as drug delivery vehicles (Levy-Nissenbaum, Etgar, et al. “Nanotechnology and aptamers: applications in drug delivery.” Trends in biotechnology 26.8 (2008): 442-449; and, Hicke B J, Stephens A W. “Escort aptamers: a delivery service for diagnosis and therapy.” J Clin Invest 2000, 106:923-928.). Aptamers may also be constructed that function as molecular switches, responding to a que by changing properties, such as RNA aptamers that bind fluorophores to mimic the activity of green flourescent protein (Paige, Jeremy S., Karen Y. Wu, and Samie R. Jaffrey. “RNA mimics of green fluorescent protein.” Science 333.6042 (2011): 642-646). It has also been suggested that aptamers may be used as components of targeted siRNA therapeutic delivery systems, for example targeting cell surface proteins (Zhou, Jiehua, and John J. Rossi. “Aptamer-targeted cell-specific RNA interference.” Silence 1.1 (2010): 4).

[0221] Accordingly, in particular embodiments, the guide molecule is modified, e.g., by one or more aptamer(s) designed to improve guide molecule delivery, including delivery across the cellular membrane, to intracellular compartments, or into the nucleus. Such a structure can include, either in addition to the one or more aptamer(s) or without such one or more aptamer(s), moiety(ies) so as to render the guide molecule deliverable, inducible or responsive to a selected effector. The invention accordingly comprehends an guide molecule that responds to normal or pathological physiological conditions, including without limitation pH, hypoxia, O₂ concentration, temperature, protein concentration, enzymatic concentration, lipid structure, light exposure, mechanical disruption (e.g. ultrasound waves), magnetic fields, electric fields, or electromagnetic radiation.

[0222] Light responsiveness of an inducible system may be achieved via the activation and binding of cryptochrome-2 and CIB1. Blue light stimulation induces an activating conformational change in cryptochrome-2, resulting in recruitment of its binding partner CIB1. This binding is fast and reversible, achieving saturation in <15 sec following pulsed stimulation and returning to baseline <15 min after the end of stimulation. These rapid binding kinetics result in a system temporally bound only by the speed of transcription/translation and transcript/protein degradation, rather than uptake and clearance of inducing agents. Crytochrome-2 activation is also highly sensitive, allowing for the use of low light intensity stimulation and mitigating the risks of phototoxicity. Further, in a context such as the intact mammalian brain, variable light intensity may be used to control the size of a stimulated region, allowing for greater precision than vector delivery alone may offer.

[0223] The invention contemplates energy sources such as electromagnetic radiation, sound energy or thermal energy to induce the guide. Advantageously, the electromagnetic radiation is a component of visible light. In a preferred embodiment, the light is a blue light with a wavelength of about 450 to about 495 nm. In an especially preferred embodiment, the wavelength is about 488 nm. In another preferred embodiment, the light stimulation is via pulses. The light power may range from about 0-9 mW/cm². In a preferred embodiment, a stimulation paradigm of as low as 0.25 sec every 15 sec should result in maximal activation.

[0224] The chemical or energy sensitive guide may undergo a conformational change upon induction by the binding of a chemical source or by the energy allowing it act as a guide and have the C2c1 CRISPR-Cas system or complex function. The invention can involve applying the chemical source or energy so as to have the guide function and the C2c1 CRISPR-Cas system or complex function; and optionally further determining that the expression of the genomic locus is altered.

[0225] There are several different designs of this chemical inducible system: 1. ABI-PYL based system inducible by Abscisic Acid (ABA) (see, e.g., stke.sciencemag.org/cgi/content/abstract/sigtrans;4/164/rs2), 2. FKBP-FRB based system inducible by rapamycin (or related chemicals based on rapamycin) (see, e.g., www.nature.com/nmeth/journal/v2/n6/full/nmeth763.html), 3. GID1-GAI based system inducible by Gibberellin (GA) (see, e.g., www.nature.com/nchembio/journal/v8/n5/full/nchembio.922.html).

[0226] A chemical inducible system can be an estrogen receptor (ER) based system inducible by 4-hydroxytamoxifen (40HT) (see, e.g., www.pnas.org/content/104/3/1027.abstract). A mutated ligand-binding domain of the estrogen receptor called ERT2 translocates into the nucleus of cells upon binding of 4-hydroxytamoxifen. In further embodiments of the invention any naturally occurring or engineered derivative of any nuclear receptor, thyroid hormone receptor, retinoic acid receptor, estrogen receptor, estrogen-related receptor, glucocorticoid receptor, progesterone receptor, androgen receptor may be used in inducible systems analogous to the ER based inducible system.

[0227] Another inducible system is based on the design using Transient receptor potential (TRP) ion channel based system inducible by energy, heat or radio-wave (see, e.g., www.sciencemag.org/content/336/6081/604). These TRP family proteins respond to different stimuli, including light and heat. When this protein is activated by light or heat, the ion channel will open and allow the entering of ions such as calcium into the plasma membrane. This influx of ions will bind to intracellular ion interacting partners linked to a polypeptide including the guide and the other components of the C2c1 CRISPR-Cas complex or system, and the binding will induce the change of sub-cellular localization of the polypeptide, leading to the entire polypeptide entering the nucleus of cells. Once inside the nucleus, the guide protein and the other components of the C2c1 CRISPR-Cas complex will be active and modulating target gene expression in cells.

[0228] While light activation may be an advantageous embodiment, sometimes it may be disadvantageous especially for in vivo applications in which the light may not penetrate the skin or other organs. In this instance, other methods of energy activation are contemplated, in particular, electric field energy and/or ultrasound which have a similar effect.

[0229] Electric field energy is preferably administered substantially as described in the art, using one or more electric pulses of from about 1 Volt/cm to about 10 kVolts/cm under in vivo conditions. Instead of or in addition to the pulses, the electric field may be delivered in a continuous manner. The electric pulse may be applied for between 1 μs and 500 milliseconds, preferably between 1 μs and 100 milliseconds. The electric field may be applied continuously or in a pulsed manner for 5 about minutes.

[0230] As used herein, ‘electric field energy’ is the electrical energy to which a cell is exposed. Preferably the electric field has a strength of from about 1 Volt/cm to about 10 kVolts/cm or more under in vivo conditions (see WO97/49450).

[0231] As used herein, the term “electric field” includes one or more pulses at variable capacitance and voltage and including exponential and/or square wave and/or modulated wave and/or modulated square wave forms. References to electric fields and electricity should be taken to include reference the presence of an electric potential difference in the environment of a cell. Such an environment may be set up by way of static electricity, alternating current (AC), direct current (DC), etc., as known in the art. The electric field may be uniform, non-uniform or otherwise, and may vary in strength and/or direction in a time dependent manner.

[0232] Single or multiple applications of electric field, as well as single or multiple applications of ultrasound are also possible, in any order and in any combination. The ultrasound and/or the electric field may be delivered as single or multiple continuous applications, or as pulses (pulsatile delivery).

[0233] Electroporation has been used in both in vitro and in vivo procedures to introduce foreign material into living cells. With in vitro applications, a sample of live cells is first mixed with the agent of interest and placed between electrodes such as parallel plates. Then, the electrodes apply an electrical field to the cell/implant mixture. Examples of systems that perform in vitro electroporation include the Electro Cell Manipulator ECM600 product, and the Electro Square Porator T820, both made by the BTX Division of Genetronics, Inc (see U.S. Pat. No. 5,869,326).

[0234] The known electroporation techniques (both in vitro and in vivo) function by applying a brief high voltage pulse to electrodes positioned around the treatment region. The electric field generated between the electrodes causes the cell membranes to temporarily become porous, whereupon molecules of the agent of interest enter the cells. In known electroporation applications, this electric field comprises a single square wave pulse on the order of 1000 V/cm, of about 100.mu.s duration. Such a pulse may be generated, for example, in known applications of the Electro Square Porator T820.

[0235] Preferably, the electric field has a strength of from about 1 V/cm to about 10 kV/cm under in vitro conditions. Thus, the electric field may have a strength of 1 V/cm, 2 V/cm, 3 V/cm, 4 V/cm, 5 V/cm, 6 V/cm, 7 V/cm, 8 V/cm, 9 V/cm, 10 V/cm, 20 V/cm, 50 V/cm, 100 V/cm, 200 V/cm, 300 V/cm, 400 V/cm, 500 V/cm, 600 V/cm, 700 V/cm, 800 V/cm, 900 V/cm, 1 kV/cm, 2 kV/cm, 5 kV/cm, 10 kV/cm, 20 kV/cm, 50 kV/cm or more. More preferably from about 0.5 kV/cm to about 4.0 kV/cm under in vitro conditions. Preferably the electric field has a strength of from about 1 V/cm to about 10 kV/cm under in vivo conditions. However, the electric field strengths may be lowered where the number of pulses delivered to the target site are increased. Thus, pulsatile delivery of electric fields at lower field strengths is envisaged.

[0236] Preferably the application of the electric field is in the form of multiple pulses such as double pulses of the same strength and capacitance or sequential pulses of varying strength and/or capacitance. As used herein, the term “pulse” includes one or more electric pulses at variable capacitance and voltage and including exponential and/or square wave and/or modulated wave/square wave forms.

[0237] Preferably the electric pulse is delivered as a waveform selected from an exponential wave form, a square wave form, a modulated wave form and a modulated square wave form.

[0238] A preferred embodiment employs direct current at low voltage. Thus, Applicants disclose the use of an electric field which is applied to the cell, tissue or tissue mass at a field strength of between 1V/cm and 20V/cm, for a period of 100 milliseconds or more, preferably 15 minutes or more.

[0239] Ultrasound is advantageously administered at a power level of from about 0.05 W/cm² to about 100 W/cm². Diagnostic or therapeutic ultrasound may be used, or combinations thereof.

[0240] As used herein, the term “ultrasound” refers to a form of energy which consists of mechanical vibrations the frequencies of which are so high they are above the range of human hearing. Lower frequency limit of the ultrasonic spectrum may generally be taken as about 20 kHz. Most diagnostic applications of ultrasound employ frequencies in the range 1 and 15 MHz' (From Ultrasonics in Clinical Diagnosis, P. N. T. Wells, ed., 2nd. Edition, Publ. Churchill Livingstone [Edinburgh, London & NY, 1977]).

[0241] Ultrasound has been used in both diagnostic and therapeutic applications. When used as a diagnostic tool (“diagnostic ultrasound”), ultrasound is typically used in an energy density range of up to about 100 mW/cm² (FDA recommendation), although energy densities of up to 750 mW/cm² have been used. In physiotherapy, ultrasound is typically used as an energy source in a range up to about 3 to 4 W/cm² (WHO recommendation). In other therapeutic applications, higher intensities of ultrasound may be employed, for example, HIFU at 100 W/cm up to 1 kW/cm² (or even higher) for short periods of time. The term “ultrasound” as used in this specification is intended to encompass diagnostic, therapeutic and focused ultrasound.

[0242] Focused ultrasound (FUS) allows thermal energy to be delivered without an invasive probe (see Morocz et al 1998 Journal of Magnetic Resonance Imaging Vol. 8, No. 1, pp. 136-142. Another form of focused ultrasound is high intensity focused ultrasound (HIFU) which is reviewed by Moussatov et al in Ultrasonics (1998) Vol. 36, No. 8, pp. 893-900 and TranHuuHue et al in Acustica (1997) Vol. 83, No. 6, pp. 1103-1106.

[0243] Preferably, a combination of diagnostic ultrasound and a therapeutic ultrasound is employed. This combination is not intended to be limiting, however, and the skilled reader will appreciate that any variety of combinations of ultrasound may be used. Additionally, the energy density, frequency of ultrasound, and period of exposure may be varied.

[0244] Preferably the exposure to an ultrasound energy source is at a power density of from about 0.05 to about 100 Wcm⁻². Even more preferably, the exposure to an ultrasound energy source is at a power density of from about 1 to about 15 Wm-2.

[0245] Preferably the exposure to an ultrasound energy source is at a frequency of from about 0.015 to about 10.0 MHz. More preferably the exposure to an ultrasound energy source is at a frequency of from about 0.02 to about 5.0 MHz or about 6.0 MHz. Most preferably, the ultrasound is applied at a frequency of 3 MHz.

[0246] Preferably the exposure is for periods of from about 10 milliseconds to about 60 minutes. Preferably the exposure is for periods of from about 1 second to about 5 minutes. More preferably, the ultrasound is applied for about 2 minutes. Depending on the particular target cell to be disrupted, however, the exposure may be for a longer duration, for example, for 15 minutes.

[0247] Advantageously, the target tissue is exposed to an ultrasound energy source at an acoustic power density of from about 0.05 Wcm⁻² to about 10 Wcm² with a frequency ranging from about 0.015 to about 10 MHz (see WO 98/52609). However, alternatives are also possible, for example, exposure to an ultrasound energy source at an acoustic power density of above 100 Wcm⁻², but for reduced periods of time, for example, 1000 Wcm⁻² for periods in the millisecond range or less.

[0248] Preferably the application of the ultrasound is in the form of multiple pulses; thus, both continuous wave and pulsed wave (pulsatile delivery of ultrasound) may be employed in any combination. For example, continuous wave ultrasound may be applied, followed by pulsed wave ultrasound, or vice versa. This may be repeated any number of times, in any order and combination. The pulsed wave ultrasound may be applied against a background of continuous wave ultrasound, and any number of pulses may be used in any number of groups.

[0249] Preferably, the ultrasound may comprise pulsed wave ultrasound. In a highly preferred embodiment, the ultrasound is applied at a power density of 0.7 Wcm-2 or 1.25 Wcm-2 as a continuous wave. Higher power densities may be employed if pulsed wave ultrasound is used.

[0250] Use of ultrasound is advantageous as, like light, it may be focused accurately on a target. Moreover, ultrasound is advantageous as it may be focused more deeply into tissues unlike light. It is therefore better suited to whole-tissue penetration (such as but not limited to a lobe of the liver) or whole organ (such as but not limited to the entire liver or an entire muscle, such as the heart) therapy. Another important advantage is that ultrasound is a non-invasive stimulus which is used in a wide variety of diagnostic and therapeutic applications. By way of example, ultrasound is well known in medical imaging techniques and, additionally, in orthopedic therapy. Furthermore, instruments suitable for the application of ultrasound to a subject vertebrate are widely available and their use is well known in the art.

[0251] The rapid transcriptional response and endogenous targeting of the instant invention make for an ideal system for the study of transcriptional dynamics. For example, the instant invention may be used to study the dynamics of variant production upon induced expression of a target gene. On the other end of the transcription cycle, mRNA degradation studies are often performed in response to a strong extracellular stimulus, causing expression level changes in a plethora of genes. The instant invention may be utilized to reversibly induce transcription of an endogenous target, after which point stimulation may be stopped and the degradation kinetics of the unique target may be tracked.

[0252] The temporal precision of the instant invention may provide the power to time genetic regulation in concert with experimental interventions. For example, targets with suspected involvement in long-term potentiation (LTP) may be modulated in organotypic or dissociated neuronal cultures, but only during stimulus to induce LTP, so as to avoid interfering with the normal development of the cells. Similarly, in cellular models exhibiting disease phenotypes, targets suspected to be involved in the effectiveness of a particular therapy may be modulated only during treatment. Conversely, genetic targets may be modulated only during a pathological stimulus. Any number of experiments in which timing of genetic cues to external experimental stimuli is of relevance may potentially benefit from the utility of the instant invention.

[0253] The in vivo context offers equally rich opportunities for the instant invention to control gene expression. Photoinducibility provides the potential for spatial precision. Taking advantage of the development of optrode technology, a stimulating fiber optic lead may be placed in a precise brain region. Stimulation region size may then be tuned by light intensity. This may be done in conjunction with the delivery of the C2c1 CRISPR-Cas system or complex of the invention, or, in the case of transgenic C2c1 animals, guide RNA of the invention may be delivered and the optrode technology can allow for the modulation of gene expression in precise brain regions. A transparent C2c1 expressing organism, can have guide RNA of the invention administered to it and then there can be extremely precise laser induced local gene expression changes.

[0254] A culture medium for culturing host cells includes a medium commonly used for tissue culture, such as M199-earle base, Eagle MEM (E-MEM), Dulbecco MEM (DMEM), SC-UCM102, UP-SFM (GIBCO BRL), EX-CELL302 (Nichirei), EX-CELL293-S(Nichirei), TFBM-01 (Nichirei), ASF104, among others. Suitable culture media for specific cell types may be found at the American Type Culture Collection (ATCC) or the European Collection of Cell Cultures (ECACC). Culture media may be supplemented with amino acids such as L-glutamine, salts, anti-fungal or anti-bacterial agents such as Fungizone®, penicillin-streptomycin, animal serum, and the like. The cell culture medium may optionally be serum-free.

[0255] The invention may also offer valuable temporal precision in vivo. The invention may be used to alter gene expression during a particular stage of development. The invention may be used to time a genetic cue to a particular experimental window. For example, genes implicated in learning may be overexpressed or repressed only during the learning stimulus in a precise region of the intact rodent or primate brain. Further, the invention may be used to induce gene expression changes only during particular stages of disease development. For example, an oncogene may be overexpressed only once a tumor reaches a particular size or metastatic stage. Conversely, proteins suspected in the development of Alzheimer's may be knocked down only at defined time points in the animal's life and within a particular brain region. Although these examples do not exhaustively list the potential applications of the invention, they highlight some of the areas in which the invention may be a powerful technology.

### Protected Guides

[0256] In particular embodiments, the guide molecule is modified by a secondary structure to increase the specificity of the CRISPR-Cas system and the secondary structure can protect against exonuclease activity and allow for 5′ additions to the guide sequence also referred to herein as a protected guide molecule.

[0257] In one aspect, the invention provides for hybridizing a “protector RNA” to a sequence of the guide molecule, wherein the “protector RNA” is an RNA strand complementary to the 3′ end of the guide molecule to thereby generate a partially double-stranded guide RNA. In an embodiment of the invention, protecting mismatched bases (i.e. the bases of the guide molecule which do not form part of the guide sequence) with a perfectly complementary protector sequence decreases the likelihood of target DNA binding to the mismatched basepairs at the 3′ end. In particular embodiments of the invention, additional sequences comprising an extended length may also be present within the guide molecule such that the guide comprises a protector sequence within the guide molecule. This “protector sequence” ensures that the guide molecule comprises a “protected sequence” in addition to an “exposed sequence” (comprising the part of the guide sequence hybridizing to the target sequence). In particular embodiments, the guide molecule is modified by the presence of the protector guide to comprise a secondary structure such as a hairpin. Advantageously there are three or four to thirty or more, e.g., about 10 or more, contiguous base pairs having complementarity to the protected sequence, the guide sequence or both. It is advantageous that the protected portion does not impede thermodynamics of the CRISPR-Cas system interacting with its target. By providing such an extension including a partially double stranded guide molecule, the guide molecule is considered protected and results in improved specific binding of the CRISPR-Cas complex, while maintaining specific activity.

[0258] Guide RNA (gRNA) extensions matching the genomic target provide gRNA protection and enhance specificity. Extension of the gRNA with matching sequence distal to the end of the spacer seed for individual genomic targets is envisaged to provide enhanced specificity. Matching gRNA extensions that enhance specificity have been observed in cells without truncation. Prediction of gRNA structure accompanying these stable length extensions has shown that stable forms arise from protective states, where the extension forms a closed loop with the gRNA seed due to complimentary sequences in the spacer extension and the spacer seed. These results demonstrate that the protected guide concept also includes sequences matching the genomic target sequence distal of the 20mer spacer-binding region. Thermodynamic prediction can be used to predict completely matching or partially matching guide extensions that result in protected gRNA states. This extends the concept of protected gRNAs to interaction between X and Z, where X will generally be of length 17-20nt and Z is of length 1-30nt. Thermodynamic prediction can be used to determine the optimal extension state for Z, potentially introducing small numbers of mismatches in Z to promote the formation of protected conformations between X and Z. Throughout the present application, the terms “X” and seed length (SL) are used interchangeably with the term exposed length (EpL) which denotes the number of nucleotides available for target DNA to bind; the terms “Y” and protector length (PL) are used interchangeably to represent the length of the protector; and the terms “Z”, “E”, “E’” and “EL” are used interchangeably to correspond to the term extended length (ExL) which represents the number of nucleotides by which the target sequence is extended.

[0259] An extension sequence which corresponds to the extended length (ExL) may optionally be attached directly to the guide sequence at the 3′ end of the protected guide sequence. The extension sequence may be 2 to 12 nucleotides in length. Preferably ExL may be denoted as 0, 2, 4, 6, 8, 10 or 12 nucleotides in length. In a preferred embodiment the ExL is denoted as 0 or 4 nucleotides in length. In a more preferred embodiment the ExL is 4 nucleotides in length. The extension sequence may or may not be complementary to the target sequence.

[0260] An extension sequence may further optionally be attached directly to the guide sequence at the 5′ end of the protected guide sequence as well as to the 3′ end of a protecting sequence. As a result, the extension sequence serves as a linking sequence between the protected sequence and the protecting sequence. Without wishing to be bound by theory, such a link may position the protecting sequence near the protected sequence for improved binding of the protecting sequence to the protected sequence. It will be understood that the above-described relationship of seed, protector, and extension applies where the distal end (i.e., the targeting end) of the guide is the 5′ end, e.g. a guide that functions in a Cas system. In an embodiment wherein the distal end of the guide is the 3′ end, the relationship will be the reverse. In such an embodiment, the invention provides for hybridizing a “protector RNA” to a guide sequence, wherein the “protector RNA” is an RNA strand complementary to the 3′ end of the guide RNA (gRNA), to thereby generate a partially double-stranded gRNA.

[0261] Addition of gRNA mismatches to the distal end of the gRNA can demonstrate enhanced specificity. The introduction of unprotected distal mismatches in Y or extension of the gRNA with distal mismatches (Z) can demonstrate enhanced specificity. This concept as mentioned is tied to X, Y, and Z components used in protected gRNAs. The unprotected mismatch concept may be further generalized to the concepts of X, Y, and Z described for protected guide RNAs.

### Tru-Guides

[0262] In particular embodiments, use is made of a truncated guide (tru-guide), i.e. a guide molecule which comprises a guide sequence which is truncated in length with respect to the canonical guide sequence length. As described by Nowak et al. (Nucleic Acids Res (2016) 44 (20): 9555-9564), such guides may allow catalytically active CRISPR-Cas enzyme to bind its target without cleaving the target DNA. In particular embodiments, a truncated guide is used which allows the binding of the target but retains only nickase activity of the CRISPR-Cas enzyme.

[0263] In a particular embodiment the guide molecule comprises a guide sequence linked to a direct repeat sequence, or a guide sequence linked to a direct repeat sequence and a tracr sequence, wherein the direct repeat sequence, the crRNA sequence, and/or the tracr sequence comprises one or more stem loops or optimized secondary structures. In particular embodiments, the direct repeat has a minimum length of 16 nts and a single stem loop. In further embodiments the direct repeat has a length longer than 16 nts, preferably more than 17 nts, and has more than one stem loops or optimized secondary structures. In particular embodiments the guide molecule comprises or consists of the guide sequence linked to all or part of the natural direct repeat sequence. A typical Type V-B C2c1/Cas12b guide molecule comprises (in 3′ to 5′ direction): a guide sequence and a complimentary stretch (the “repeat”), complementary to the 3′ end of a tracr. The repeat and the tracr may be joined into a chimeric guide comprising a region designed to form a stem-loop (the loop typically 4 or 5 nucleotides long), including second complimentary stretch (the “anti-repeat” of a tracr being complimentary to the repeat), and a poly A (often poly U in RNA) tail (terminator). In particular embodiments, certain aspects of the guide architecture can be modified, for example by addition, subtraction, or substitution of features, whereas certain other aspects of guide architecture are maintained. Preferred locations for engineered guide molecule modifications, including but are not limited to insertions, deletions, and substitutions including at guide termini and regions of the guide molecule that are exposed when complexed with the C2c1 protein and/or target, for example the stem-loop of the direct repeat sequence.

### Chimeric Guides

[0264] The invention provides a variety of Cas12b system guides. In certain embodiments, the guides comprise two hybridizable parts, the 3′ end of the first part being at least partially complementary to and capable of hybridizing with the 5′ end of the second part. In certain embodiments, the two parts are joined. That is, a single guide (“chimeric guide”) can be employed comprising a first segment at the 5′ end corresponding to the guide sequence and direct repeat of a natural Cas12b guide, joined to a second segment at the 3′ end corresponding to the a Cas12b tracr sequence. The two segments are joined such that the complementary sequences of the 3′ end of the first segment and the 5′ end of the second segment can hybridize, for example in a stem-loop structure.

### Dead Guides

[0265] In one aspect, the invention provides guide sequences which are modified in a manner which allows for formation of the CRISPR complex and successful binding to the target, while at the same time, not allowing for successful nuclease activity (i.e. without nuclease activity/without indel activity). For matters of explanation such modified guide sequences are referred to as “dead guides” or “dead guide sequences”. These dead guides or dead guide sequences can be thought of as catalytically inactive or conformationally inactive with regard to nuclease activity. Nuclease activity may be measured using surveyor analysis or deep sequencing as commonly used in the art, preferably surveyor analysis. Similarly, dead guide sequences may not sufficiently engage in productive base pairing with respect to the ability to promote catalytic activity or to distinguish on-target and off-target binding activity. Briefly, the surveyor assay involves purifying and amplifying a CRISPR target site for a gene and forming heteroduplexes with primers amplifying the CRISPR target site. After re-anneal, the products are treated with SURVEYOR nuclease and SURVEYOR enhancer S (Transgenomics) following the manufacturer's recommended protocols, analyzed on gels, and quantified based upon relative band intensities.

[0266] Hence, in a related aspect, the invention provides a non-naturally occurring or engineered composition C2c1 CRISPR-Cas system comprising a functional Cas12b as described herein, and guide RNA (gRNA) wherein the gRNA comprises a dead guide sequence whereby the gRNA is capable of hybridizing to a target sequence such that the Cas12b CRISPR-Cas system is directed to a genomic locus of interest in a cell without detectable indel activity resultant from nuclease activity of a non-mutant Cas12b enzyme of the system as detected by a SURVEYOR assay. For shorthand purposes, a gRNA comprising a dead guide sequence whereby the gRNA is capable of hybridizing to a target sequence such that the Cas12b CRISPR-Cas system is directed to a genomic locus of interest in a cell without detectable indel activity resultant from nuclease activity of a non-mutant Cas12b enzyme of the system as detected by a SURVEYOR assay is herein termed a “dead gRNA”. It is to be understood that any of the gRNAs according to the invention as described herein elsewhere may be used as dead gRNAs/gRNAs comprising a dead guide sequence as described herein below. Any of the methods, products, compositions and uses as described herein elsewhere is equally applicable with the dead gRNAs/gRNAs comprising a dead guide sequence as further detailed below. By means of further guidance, the following particular aspects and embodiments are provided.

[0267] The ability of a dead guide sequence to direct sequence-specific binding of a CRISPR complex to a target sequence may be assessed by any suitable assay. For example, the components of a CRISPR system sufficient to form a CRISPR complex, including the dead guide sequence to be tested, may be provided to a host cell having the corresponding target sequence, such as by transfection with vectors encoding the components of the CRISPR sequence, followed by an assessment of preferential cleavage within the target sequence, such as by Surveyor assay as described herein. Similarly, cleavage of a target polynucleotide sequence may be evaluated in a test tube by providing the target sequence, components of a CRISPR complex, including the dead guide sequence to be tested and a control guide sequence different from the test dead guide sequence, and comparing binding or rate of cleavage at the target sequence between the test and control guide sequence reactions. Other assays are possible, and will occur to those skilled in the art. A dead guide sequence may be selected to target any target sequence. In some embodiments, the target sequence is a sequence within a genome of a cell.

[0268] As explained further herein, several structural parameters allow for a proper framework to arrive at such dead guides. Dead guide sequences are shorter than respective guide sequences which result in active Cas12b-specific indel formation. Dead guides are 5%, 10%, 20%, 30%, 40%, 50%, shorter than respective guides directed to the same Cas12b leading to active Cas12b-specific indel formation.

[0269] As explained below and known in the art, one aspect of gRNA—C2c1 specificity is the direct repeat sequence, which is to be appropriately linked to such guides. In particular, this implies that the direct repeat sequences are designed dependent on the origin of the C2c1. Thus, structural data available for validated dead guide sequences may be used for designing C2c1 specific equivalents. Structural similarity between, e.g., the orthologous nuclease domains RuvC of two or more C2c1 effector proteins may be used to transfer design equivalent dead guides. Thus, the dead guide herein may be appropriately modified in length and sequence to reflect such C2c1 specific equivalents, allowing for formation of the CRISPR complex and successful binding to the target, while at the same time, not allowing for successful nuclease activity.

[0270] The use of dead guides in the context herein as well as the state of the art provides a surprising and unexpected platform for network biology and/or systems biology in both in vitro, ex vivo, and in vivo applications, allowing for multiplex gene targeting, and in particular bidirectional multiplex gene targeting. Prior to the use of dead guides, addressing multiple targets, for example for activation, repression and/or silencing of gene activity, has been challenging and in some cases not possible. With the use of dead guides, multiple targets, and thus multiple activities, may be addressed, for example, in the same cell, in the same animal, or in the same patient. Such multiplexing may occur at the same time or staggered for a desired timeframe.

[0271] For example, the dead guides now allow for the first time to use gRNA as a means for gene targeting, without the consequence of nuclease activity, while at the same time providing directed means for activation or repression. Guide RNA comprising a dead guide may be modified to further include elements in a manner which allow for activation or repression of gene activity, in particular protein adaptors (e.g. aptamers) as described herein elsewhere allowing for functional placement of gene effectors (e.g. activators or repressors of gene activity). One example is the incorporation of aptamers, as explained herein and in the state of the art. By engineering the gRNA comprising a dead guide to incorporate protein-interacting aptamers (Konermann et al., “Genome-scale transcription activation by an engineered CRISPR-Cas9 complex,” doi:10.1038/nature14136, incorporated herein by reference), one may assemble a synthetic transcription activation complex consisting of multiple distinct effector domains. Such may be modeled after natural transcription activation processes. For example, an aptamer, which selectively binds an effector (e.g. an activator or repressor; dimerized MS2 bacteriophage coat proteins as fusion proteins with an activator or repressor), or a protein which itself binds an effector (e.g. activator or repressor) may be appended to a dead gRNA tetraloop and/or a stem-loop 2. In the case of MS2, the fusion protein MS2-VP64 binds to the tetraloop and/or stem-loop 2 and in turn mediates transcriptional up-regulation, for example for Neurog2. Other transcriptional activators are, for example, VP64. P65, HSF1, and MyoD1. By mere example of this concept, replacement of the MS2 stem-loops with PP7-interacting stem-loops may be used to recruit repressive elements.

[0272] Thus, one aspect is a gRNA of the invention which comprises a dead guide, wherein the gRNA further comprises modifications which provide for gene activation or repression, as described herein. The dead gRNA may comprise one or more aptamers. The aptamers may be specific to gene effectors, gene activators or gene repressors. Alternatively, the aptamers may be specific to a protein which in turn is specific to and recruits/binds a specific gene effector, gene activator or gene repressor. If there are multiple sites for activator or repressor recruitment, it is preferred that the sites are specific to either activators or repressors. If there are multiple sites for activator or repressor binding, the sites may be specific to the same activators or same repressors. The sites may also be specific to different activators or different repressors. The gene effectors, gene activators, gene repressors may be present in the form of fusion proteins.

[0273] In an embodiment, the dead gRNA as described herein or the C2c1 CRISPR-Cas complex as described herein includes a non-naturally occurring or engineered composition comprising two or more adaptor proteins, wherein each protein is associated with one or more functional domains and wherein the adaptor protein binds to the distinct RNA sequence(s) inserted into the at least one loop of the dead gRNA.

[0274] Hence, an aspect provides a non-naturally occurring or engineered composition comprising a guide RNA (gRNA) comprising a dead guide sequence capable of hybridizing to a target sequence in a genomic locus of interest in a cell, wherein the dead guide sequence is as defined herein, a C2c1 comprising at least one or more nuclear localization sequences, wherein the C2c1 optionally comprises at least one mutation wherein at least one loop of the dead gRNA is modified by the insertion of distinct RNA sequence(s) that bind to one or more adaptor proteins, and wherein the adaptor protein is associated with one or more functional domains; or, wherein the dead gRNA is modified to have at least one non-coding functional loop, and wherein the composition comprises two or more adaptor proteins, wherein the each protein is associated with one or more functional domains.

[0275] In certain embodiments, the adaptor protein is a fusion protein comprising the functional domain, the fusion protein optionally comprising a linker between the adaptor protein and the functional domain, the linker optionally including a GlySer linker.

[0276] In certain embodiments, the at least one loop of the dead gRNA is not modified by the insertion of distinct RNA sequence(s) that bind to the two or more adaptor proteins.

[0277] In certain embodiments, the one or more functional domains associated with the adaptor protein is a transcriptional activation domain.

[0278] In certain embodiments, the one or more functional domains associated with the adaptor protein is a transcriptional activation domain comprising VP64, p65, MyoD1, HSF1, RTA or SET7/9.

[0279] In certain embodiments, the one or more functional domains associated with the adaptor protein is a transcriptional repressor domain.

[0280] In certain embodiments, the transcriptional repressor domain is a KRAB domain.

[0281] In certain embodiments, the transcriptional repressor domain is a NuE domain, NcoR domain, SID domain or a SID4X domain.

[0282] In certain embodiments, at least one of the one or more functional domains associated with the adaptor protein have one or more activities comprising methylase activity, demethylase activity, transcription activation activity, transcription repression activity, transcription release factor activity, histone modification activity, DNA integration activity RNA cleavage activity, DNA cleavage activity or nucleic acid binding activity.

[0283] In certain embodiments, the DNA cleavage activity is due to a Fok1 nuclease.

[0284] In certain embodiments, the dead gRNA is modified so that, after dead gRNA binds the adaptor protein and further binds to the C2c1 and target, the functional domain is in a spatial orientation allowing for the functional domain to function in its attributed function.

[0285] In certain embodiments, the at least one loop of the dead gRNA is tetra loop and/or loop2. In certain embodiments, the tetra loop and loop 2 of the dead gRNA are modified by the insertion of the distinct RNA sequence(s).

[0286] In certain embodiments, the insertion of distinct RNA sequence(s) that bind to one or more adaptor proteins is an aptamer sequence. In certain embodiments, the aptamer sequence is two or more aptamer sequences specific to the same adaptor protein. In certain embodiments, the aptamer sequence is two or more aptamer sequences specific to different adaptor protein.

[0287] In certain embodiments, the adaptor protein comprises MS2, PP7, Qβ, F2, GA, fr, JP501, M12, R17, BZ13, JP34, JP500, KU1, M11, MX1, TW18, VK, SP, FI, ID2, NL95, TW19, AP205, ϕCb5, ϕCb8r, ϕCb12r, ϕCb23r, 7s, PRR1.

[0288] In certain embodiments, the cell is a eukaryotic cell. In certain embodiments, the eukaryotic cell is a mammalian cell, optionally a mouse cell. In certain embodiments, the mammalian cell is a human cell.

[0289] In certain embodiments, a first adaptor protein is associated with a p65 domain and a second adaptor protein is associated with a HSF1 domain.

[0290] In certain embodiments, the composition comprises a C2c CRISPR-Cas complex having at least three functional domains, at least one of which is associated with the C2c1 and at least two of which are associated with dead gRNA.

[0291] In certain embodiments, the composition further comprises a second gRNA, wherein the second gRNA is a live gRNA capable of hybridizing to a second target sequence such that a second C2c1 CRISPR-Cas system is directed to a second genomic locus of interest in a cell with detectable indel activity at the second genomic locus resultant from nuclease activity of the C2c1 enzyme of the system.

[0292] In certain embodiments, the composition further comprises a plurality of dead gRNAs and/or a plurality of live gRNAs.

[0293] One aspect of the invention is to take advantage of the modularity and customizability of the gRNA scaffold to establish a series of gRNA scaffolds with different binding sites (in particular aptamers) for recruiting distinct types of effectors in an orthogonal manner. Again, for matters of example and illustration of the broader concept, replacement of the MS2 stem-loops with PP7-interacting stem-loops may be used to bind/recruit repressive elements, enabling multiplexed bidirectional transcriptional control. Thus, in general, gRNA comprising a dead guide may be employed to provide for multiplex transcriptional control and preferred bidirectional transcriptional control. This transcriptional control is most preferred of genes. For example, one or more gRNA comprising dead guide(s) may be employed in targeting the activation of one or more target genes. At the same time, one or more gRNA comprising dead guide(s) may be employed in targeting the repression of one or more target genes. Such a sequence may be applied in a variety of different combinations, for example the target genes are first repressed and then at an appropriate period other targets are activated, or select genes are repressed at the same time as select genes are activated, followed by further activation and/or repression. As a result, multiple components of one or more biological systems may advantageously be addressed together.

[0294] In an aspect, the invention provides nucleic acid molecule(s) encoding dead gRNA or the C2c1 CRISPR-Cas complex or the composition as described herein.

[0295] In an aspect, the invention provides a vector system comprising: a nucleic acid molecule encoding dead guide RNA as defined herein. In certain embodiments, the vector system further comprises a nucleic acid molecule(s) encoding C2c1. In certain embodiments, the vector system further comprises a nucleic acid molecule(s) encoding (live) gRNA. In certain embodiments, the nucleic acid molecule or the vector further comprises regulatory element(s) operable in a eukaryotic cell operably linked to the nucleic acid molecule encoding the guide sequence (gRNA) and/or the nucleic acid molecule encoding C2c1 and/or the optional nuclear localization sequence(s).

[0296] In another aspect, structural analysis may also be used to study interactions between the dead guide and the active C2c1 nuclease that enable DNA binding, but no DNA cutting. In this way amino acids important for nuclease activity of C2c1 are determined. Modification of such amino acids allows for improved C2c1 enzymes used for gene editing.

[0297] A further aspect is combining the use of dead guides as explained herein with other applications of CRISPR, as explained herein as well as known in the art. For example, gRNA comprising dead guide(s) for targeted multiplex gene activation or repression or targeted multiplex bidirectional gene activation/repression may be combined with gRNA comprising guides which maintain nuclease activity, as explained herein. Such gRNA comprising guides which maintain nuclease activity may or may not further include modifications which allow for repression of gene activity (e.g. aptamers). Such gRNA comprising guides which maintain nuclease activity may or may not further include modifications which allow for activation of gene activity (e.g. aptamers). In such a manner, a further means for multiplex gene control is introduced (e.g. multiplex gene targeted activation without nuclease activity/without indel activity may be provided at the same time or in combination with gene targeted repression with nuclease activity).

[0298] For example, 1) using one or more gRNA (e.g. 1-50, 1-40, 1-30, 1-20, preferably 1-10, more preferably 1-5) comprising dead guide(s) targeted to one or more genes and further modified with appropriate aptamers for the recruitment of gene activators; 2) may be combined with one or more gRNA (e.g. 1-50, 1-40, 1-30, 1-20, preferably 1-10, more preferably 1-5) comprising dead guide(s) targeted to one or more genes and further modified with appropriate aptamers for the recruitment of gene repressors. 1) and/or 2) may then be combined with 3) one or more gRNA (e.g. 1-50, 1-40, 1-30, 1-20, preferably 1-10, more preferably 1-5) targeted to one or more genes. This combination can then be carried out in turn with 1)+2)+3) with 4) one or more gRNA (e.g. 1-50, 1-40, 1-30, 1-20, preferably 1-10, more preferably 1-5) targeted to one or more genes and further modified with appropriate aptamers for the recruitment of gene activators. This combination can then be carried in turn with 1)+2)+3)+4) with 5) one or more gRNA (e.g. 1-50, 1-40, 1-30, 1-20, preferably 1-10, more preferably 1-5) targeted to one or more genes and further modified with appropriate aptamers for the recruitment of gene repressors. As a result various uses and combinations are included in the invention. For example, combination 1)+2); combination 1)+3); combination 2)+3); combination 1)+2)+3); combination 1)+2)+3)+4); combination 1)+3)+4); combination 2)+3)+4); combination 1)+2)+4); combination 1)+2)+3)+4)+5); combination 1)+3)+4)+5); combination 2)+3)+4)+5); combination 1)+2)+4)+5); combination 1)+2)+3)+5); combination 1)+3)+5); combination 2)+3)+5); combination 1)+2)+5).

[0299] In an aspect, the invention provides an algorithm for designing, evaluating, or selecting a dead guide RNA targeting sequence (dead guide sequence) for guiding a C2c1 CRISPR-Cas system to a target gene locus. In particular, it has been determined that dead guide RNA specificity relates to and can be optimized by varying i) GC content and ii) targeting sequence length. In an aspect, the invention provides an algorithm for designing or evaluating a dead guide RNA targeting sequence that minimizes off-target binding or interaction of the dead guide RNA. In an embodiment of the invention, the algorithm for selecting a dead guide RNA targeting sequence for directing a CRISPR system to a gene locus in an organism comprises a) locating one or more CRISPR motifs in the gene locus, analyzing the 20 nt sequence downstream of each CRISPR motif by i) determining the GC content of the sequence; and ii) determining whether there are off-target matches of the 15 downstream nucleotides nearest to the CRISPR motif in the genome of the organism, and c) selecting the 15 nucleotide sequence for use in a dead guide RNA if the GC content of the sequence is 70% or less and no off-target matches are identified. In an embodiment, the sequence is selected for a targeting sequence if the GC content is 60% or less. In certain embodiments, the sequence is selected for a targeting sequence if the GC content is 55% or less, 50% or less, 45% or less, 40% or less, 35% or less or 30% or less. In an embodiment, two or more sequences of the gene locus are analyzed and the sequence having the lowest GC content, or the next lowest GC content, or the next lowest GC content is selected. In an embodiment, the sequence is selected for a targeting sequence if no off-target matches are identified in the genome of the organism. In an embodiment, the targeting sequence is selected if no off-target matches are identified in regulatory sequences of the genome.

[0300] In an aspect, the invention provides a method of selecting a dead guide RNA targeting sequence for directing a functionalized CRISPR system to a gene locus in an organism, which comprises: a) locating one or more CRISPR motifs in the gene locus; b) analyzing the 20 nt sequence downstream of each CRISPR motif by: i) determining the GC content of the sequence; and ii) determining whether there are off-target matches of the first 15 nt of the sequence in the genome of the organism; c) selecting the sequence for use in a guide RNA if the GC content of the sequence is 70% or less and no off-target matches are identified. In an embodiment, the sequence is selected if the GC content is 50% or less. In an embodiment, the sequence is selected if the GC content is 40% or less. In an embodiment, the sequence is selected if the GC content is 30% or less. In an embodiment, two or more sequences are analyzed and the sequence having the lowest GC content is selected. In an embodiment, off-target matches are determined in regulatory sequences of the organism. In an embodiment, the gene locus is a regulatory region. An aspect provides a dead guide RNA comprising the targeting sequence selected according to the aforementioned methods.

[0301] In an aspect, the invention provides a dead guide RNA for targeting a functionalized CRISPR system to a gene locus in an organism. In an embodiment of the invention, the dead guide RNA comprises a targeting sequence wherein the CG content of the target sequence is 70% or less, and the first 15 nt of the targeting sequence does not match an off-target sequence downstream from a CRISPR motif in the regulatory sequence of another gene locus in the organism. In certain embodiments, the GC content of the targeting sequence 60% or less, 55% or less, 50% or less, 45% or less, 40% or less, 35% or less or 30% or less. In certain embodiments, the GC content of the targeting sequence is from 70% to 60% or from 60% to 50% or from 50% to 40% or from 40% to 30%. In an embodiment, the targeting sequence has the lowest CG content among potential targeting sequences of the locus.

[0302] In an embodiment of the invention, the first 15 nt of the dead guide match the target sequence. In another embodiment, first 14 nt of the dead guide match the target sequence. In another embodiment, the first 13 nt of the dead guide match the target sequence. In another embodiment first 12 nt of the dead guide match the target sequence. In another embodiment, first 11 nt of the dead guide match the target sequence. In another embodiment, the first 10 nt of the dead guide match the target sequence. In an embodiment of the invention the first 15 nt of the dead guide does not match an off-target sequence downstream from a CRISPR motif in the regulatory region of another gene locus. In other embodiments, the first 14 nt, or the first 13 nt of the dead guide, or the first 12 nt of the guide, or the first 11 nt of the dead guide, or the first 10 nt of the dead guide, does not match an off-target sequence downstream from a CRISPR motif in the regulatory region of another gene locus. In other embodiments, the first 15 nt, or 14 nt, or 13 nt, or 12 nt, or 11 nt of the dead guide do not match an off-target sequence downstream from a CRISPR motif in the genome.

[0303] In certain embodiments, the dead guide RNA includes additional nucleotides at the 3′-end that do not match the target sequence. Thus, a dead guide RNA that includes the first 15 nt, or 14 nt, or 13 nt, or 12 nt, or 11 nt downstream of a CRISPR motif can be extended in length at the 3′ end to 12 nt, 13 nt, 14 nt, 15 nt, 16 nt, 17 nt, 18 nt, 19 nt, 20 nt, or longer.

[0304] The invention provides a method for directing a C2c1 CRISPR-Cas system, including but not limited to a dead C2c1 (dC2c1) or functionalized C2c1 system (which may comprise a functionalized C2c1 or functionalized guide) to a gene locus. In an aspect, the invention provides a method for selecting a dead guide RNA targeting sequence and directing a functionalized CRISPR system to a gene locus in an organism. In an aspect, the invention provides a method for selecting a dead guide RNA targeting sequence and effecting gene regulation of a target gene locus by a functionalized C2c1 CRISPR-Cas system. In certain embodiments, the method is used to effect target gene regulation while minimizing off-target effects. In an aspect, the invention provides a method for selecting two or more dead guide RNA targeting sequences and effecting gene regulation of two or more target gene loci by a functionalized C2c1 CRISPR-Cas system. In certain embodiments, the method is used to effect regulation of two or more target gene loci while minimizing off-target effects.

[0305] In an aspect, the invention provides a method of selecting a dead guide RNA targeting sequence for directing a functionalized C2c1 to a gene locus in an organism, which comprises: a) locating one or more CRISPR motifs in the gene locus; b) analyzing the sequence downstream of each CRISPR motif by: i) selecting 10 to 15 nt adjacent to the CRISPR motif, ii) determining the GC content of the sequence; and c) selecting the 10 to 15 nt sequence as a targeting sequence for use in a guide RNA if the GC content of the sequence is 40% or more. In an embodiment, the sequence is selected if the GC content is 50% or more. In an embodiment, the sequence is selected if the GC content is 60% or more. In an embodiment, the sequence is selected if the GC content is 70% or more. In an embodiment, two or more sequences are analyzed and the sequence having the highest GC content is selected. In an embodiment, the method further comprises adding nucleotides to the 3′ end of the selected sequence which do not match the sequence downstream of the CRISPR motif. An aspect provides a dead guide RNA comprising the targeting sequence selected according to the aforementioned methods.

[0306] In an aspect, the invention provides a dead guide RNA for directing a functionalized CRISPR system to a gene locus in an organism wherein the targeting sequence of the dead guide RNA consists of 10 to 15 nucleotides adjacent to the CRISPR motif of the gene locus, wherein the CG content of the target sequence is 50% or more. In certain embodiments, the dead guide RNA further comprises nucleotides added to the 3′ end of the targeting sequence which do not match the sequence downstream of the CRISPR motif of the gene locus.

[0307] In an aspect, the invention provides for a single effector to be directed to one or more, or two or more gene loci. In certain embodiments, the effector is associated with a C2c1, and one or more, or two or more selected dead guide RNAs are used to direct the C2c1-associated effector to one or more, or two or more selected target gene loci. In certain embodiments, the effector is associated with one or more, or two or more selected dead guide RNAs, each selected dead guide RNA, when complexed with a C2c1 enzyme, causing its associated effector to localize to the dead guide RNA target. One non-limiting example of such CRISPR systems modulates activity of one or more, or two or more gene loci subject to regulation by the same transcription factor.

[0308] In an aspect, the invention provides for two or more effectors to be directed to one or more gene loci. In certain embodiments, two or more dead guide RNAs are employed, each of the two or more effectors being associated with a selected dead guide RNA, with each of the two or more effectors being localized to the selected target of its dead guide RNA. One non-limiting example of such CRISPR systems modulates activity of one or more, or two or more gene loci subject to regulation by different transcription factors. Thus, in one non-limiting embodiment, two or more transcription factors are localized to different regulatory sequences of a single gene. In another non-limiting embodiment, two or more transcription factors are localized to different regulatory sequences of different genes. In certain embodiments, one transcription factor is an activator. In certain embodiments, one transcription factor is an inhibitor. In certain embodiments, one transcription factor is an activator and another transcription factor is an inhibitor. In certain embodiments, gene loci expressing different components of the same regulatory pathway are regulated. In certain embodiments, gene loci expressing components of different regulatory pathways are regulated.

[0309] In an aspect, the invention also provides a method and algorithm for designing and selecting dead guide RNAs that are specific for target DNA cleavage or target binding and gene regulation mediated by an active C2c1 CRISPR-Cas system. In certain embodiments, the C2c1 CRISPR-Cas system provides orthogonal gene control using an active C2c1 which cleaves target DNA at one gene locus while at the same time binds to and promotes regulation of another gene locus.

[0310] In an aspect, the invention provides an method of selecting a dead guide RNA targeting sequence for directing a functionalized Cas12b to a gene locus in an organism, without cleavage. In certain embodiments, the method comprises a) locating one or more CRISPR motifs in the gene locus; b) analyzing the sequence downstream of each CRISPR motif by i) selecting 10 to 15 nt adjacent to the CRISPR motif, ii) determining the GC content of the sequence, and c) selecting the 10 to 15 nt sequence as a targeting sequence for use in a dead guide RNA if the GC content of the sequence is 30% more, 40% or more. In certain embodiments, the GC content of the targeting sequence is 35% or more, 40% or more, 45% or more, 50% or more, 55% or more, 60% or more, 65% or more, or 70% or more. In certain embodiments, the GC content of the targeting sequence is from 30% to 40% or from 40% to 50% or from 50% to 60% or from 60% to 70%. In an embodiment of the invention, two or more sequences in a gene locus are analyzed and the sequence having the highest GC content is selected.

[0311] In an embodiment of the invention, the portion of the targeting sequence in which GC content is evaluated is 10 to 15 contiguous nucleotides of the 15 target nucleotides nearest to the PAM. In an embodiment of the invention, the portion of the guide in which GC content is considered is the 10 to 11 nucleotides or 11 to 12 nucleotides or 12 to 13 nucleotides or 13, or 14, or 15 contiguous nucleotides of the 15 nucleotides nearest to the PAM.

[0312] In an aspect, the invention further provides an algorithm for identifying dead guide RNAs which promote CRISPR system gene locus cleavage while avoiding functional activation or inhibition. It is observed that increased GC content in dead guide RNAs of 16 to 20 nucleotides coincides with increased DNA cleavage and reduced functional activation.

[0313] Efficiency of functionalized Cas12b can be increased by addition of nucleotides to the 3′ end of a guide RNA which do not match a target sequence downstream of the CRISPR motif. For example, of dead guide RNA 11 to 15 nt in length, shorter guides may be less likely to promote target cleavage, but are also less efficient at promoting CRISPR system binding and functional control. In certain embodiments, addition of nucleotides that don't match the target sequence to the 3′ end of the dead guide RNA increase activation efficiency while not increasing undesired target cleavage. In an aspect, the invention also provides a method and algorithm for identifying improved dead guide RNAs that effectively promote CRISPRP system function in DNA binding and gene regulation while not promoting DNA cleavage. Thus, in certain embodiments, the invention provides a dead guide RNA that includes the first 15 nt, or 14 nt, or 13 nt, or 12 nt, or 11 nt downstream of a CRISPR motif and is extended in length at the 3′ end by nucleotides that mismatch the target to 12 nt, 13 nt, 14 nt, 15 nt, 16 nt, 17 nt, 18 nt, 19 nt, 20 nt, or longer.

[0314] In an aspect, the invention provides a method for effecting selective orthogonal gene control. As will be appreciated from the disclosure herein, dead guide selection according to the invention, taking into account guide length and GC content, provides effective and selective transcription control by a functional Cas12b CRISPR-Cas system, for example to regulate transcription of a gene locus by activation or inhibition and minimize off-target effects. Accordingly, by providing effective regulation of individual target loci, the invention also provides effective orthogonal regulation of two or more target loci.

[0315] In certain embodiments, orthogonal gene control is by activation or inhibition of two or more target loci. In certain embodiments, orthogonal gene control is by activation or inhibition of one or more target locus and cleavage of one or more target locus.

[0316] In one aspect, the invention provides a cell comprising a non-naturally occurring Cas12b CRISPR-Cas system comprising one or more dead guide RNAs disclosed or made according to a method or algorithm described herein wherein the expression of one or more gene products has been altered. In an embodiment of the invention, the expression in the cell of two or more gene products has been altered. The invention also provides a cell line from such a cell.

[0317] In one aspect, the invention provides a multicellular organism comprising one or more cells comprising a non-naturally occurring Cas12b CRISPR-Cas system comprising one or more dead guide RNAs disclosed or made according to a method or algorithm described herein. In one aspect, the invention provides a product from a cell, cell line, or multicellular organism comprising a non-naturally occurring Cas12b CRISPR-Cas system comprising one or more dead guide RNAs disclosed or made according to a method or algorithm described herein.

[0318] A further aspect of this invention is the use of gRNA comprising dead guide(s) as described herein, optionally in combination with gRNA comprising guide(s) as described herein or in the state of the art, in combination with systems e.g. cells, transgenic animals, transgenic mice, inducible transgenic animals, inducible transgenic mice) which are engineered for either overexpression of Cas12b or preferably knock in Cas12b. As a result a single system (e.g. transgenic animal, cell) can serve as a basis for multiplex gene modifications in systems/network biology. On account of the dead guides, this is now possible in both in vitro, ex vivo, and in vivo.

[0319] For example, once the Cas12b is provided for, one or more dead gRNAs may be provided to direct multiplex gene regulation, and preferably multiplex bidirectional gene regulation. The one or more dead gRNAs may be provided in a spatially and temporally appropriate manner if necessary or desired (for example tissue specific induction of Cas12b expression). On account that the transgenic/inducible Cas12b is provided for (e.g. expressed) in the cell, tissue, animal of interest, both gRNAs comprising dead guides or gRNAs comprising guides are equally effective. In the same manner, a further aspect of this invention is the use of gRNA comprising dead guide(s) as described herein, optionally in combination with gRNA comprising guide(s) as described herein or in the state of the art, in combination with systems (e.g. cells, transgenic animals, transgenic mice, inducible transgenic animals, inducible transgenic mice) which are engineered for knockout Cas12b CRISPR-Cas.

[0320] As a result, the combination of dead guides as described herein with CRISPR applications described herein and CRISPR applications known in the art results in a highly efficient and accurate means for multiplex screening of systems (e.g. network biology). Such screening allows, for example, identification of specific combinations of gene activities for identifying genes responsible for diseases (e.g. on/off combinations), in particular gene related diseases. A preferred application of such screening is cancer. In the same manner, screening for treatment for such diseases is included in the invention. Cells or animals may be exposed to aberrant conditions resulting in disease or disease like effects. Candidate compositions may be provided and screened for an effect in the desired multiplex environment. For example a patient's cancer cells may be screened for which gene combinations will cause them to die, and then use this information to establish appropriate therapies.

[0321] In one aspect, the invention provides a kit comprising one or more of the components described herein. The kit may include dead guides as described herein with or without guides as described herein.

[0322] The structural information provided herein allows for interrogation of dead gRNA interaction with the target DNA and the Cas12b permitting engineering or alteration of dead gRNA structure to optimize functionality of the entire Cas12b CRISPR-Cas system. For example, loops of the dead gRNA may be extended, without colliding with the Cas12b protein by the insertion of adaptor proteins that can bind to RNA. These adaptor proteins can further recruit effector proteins or fusions which comprise one or more functional domains.

[0323] In some preferred embodiments, the functional domain is a transcriptional activation domain, preferably VP64. In some embodiments, the functional domain is a transcription repression domain, preferably KRAB. In some embodiments, the transcription repression domain is SID, or concatemers of SID (e.g. SID4X). In some embodiments, the functional domain is an epigenetic modifying domain, such that an epigenetic modifying enzyme is provided. In some embodiments, the functional domain is an activation domain, which may be the P65 activation domain. In some embodiments, the Cas12b effector protein is associated with one or more functional domains; and the Cas12b effector protein contains one or more mutations within a RuvC and/or Nuc domain, whereby the formed CRISPR complex is capable of delivering an epigenetic modifier or a transcriptional or translational activation or repression signal.

[0324] An aspect of the invention is that the above elements are comprised in a single composition or comprised in individual compositions. These compositions may advantageously be applied to a host to elicit a functional effect on the genomic level.

[0325] In general, the dead gRNA are modified in a manner that provides specific binding sites (e.g. aptamers) for adapter proteins comprising one or more functional domains (e.g. via fusion protein) to bind to. The modified dead gRNA are modified such that once the dead gRNA forms a CRISPR complex (i.e. Cas12b binding to dead gRNA and target) the adapter proteins bind and, the functional domain on the adapter protein is positioned in a spatial orientation which is advantageous for the attributed function to be effective. For example, if the functional domain is a transcription activator (e.g. VP64 or p65), the transcription activator is placed in a spatial orientation that allows it to affect the transcription of the target. Likewise, a transcription repressor will be advantageously positioned to affect the transcription of the target and a nuclease (e.g. Fok1) will be advantageously positioned to cleave or partially cleave the target.

[0326] The skilled person will understand that modifications to the dead gRNA which allow for binding of the adapter+functional domain but not proper positioning of the adapter+functional domain (e.g. due to steric hindrance within the three dimensional structure of the CRISPR complex) are modifications which are not intended.

[0327] As explained herein the functional domains may be, for example, one or more domains from the group consisting of methylase activity, demethylase activity, transcription activation activity, transcription repression activity, transcription release factor activity, histone modification activity, RNA cleavage activity, DNA cleavage activity, nucleic acid binding activity, and molecular switches (e.g. light inducible). In some cases it is advantageous that additionally at least one NLS is provided. In some instances, it is advantageous to position the NLS at the N terminus. When more than one functional domain is included, the functional domains may be the same or different.

[0328] The dead gRNA may be designed to include multiple binding recognition sites (e.g. aptamers) specific to the same or different adapter protein. The dead gRNA may be designed to bind to the promoter region −1000-+1 nucleic acids upstream of the transcription start site (i.e. TSS), preferably −200 nucleic acids. This positioning improves functional domains that affect gene activation (e.g. transcription activators) or gene inhibition (e.g. transcription repressors). The modified dead gRNA may be one or more modified dead gRNAs targeted to one or more target loci (e.g. at least 1 gRNA, at least 2 gRNA, at least 5 gRNA, at least 10 gRNA, at least 20 gRNA, at least 30 gRNA, at least 50 gRNA) comprised in a composition.

[0329] The adaptor protein may be any number of proteins that binds to an aptamer or recognition site introduced into the modified dead gRNA and which allows proper positioning of one or more functional domains, once the dead gRNA has been incorporated into the CRISPR complex, to affect the target with the attributed function. As explained in detail in this application such may be coat proteins, preferably bacteriophage coat proteins. The functional domains associated with such adaptor proteins (e.g. in the form of fusion protein) may include, for example, one or more domains from the group consisting of methylase activity, demethylase activity, transcription activation activity, transcription repression activity, transcription release factor activity, histone modification activity, RNA cleavage activity, DNA cleavage activity, nucleic acid binding activity, and molecular switches (e.g. light inducible). Preferred domains are Fok1, VP64, P65, HSF1, MyoD1. In the event that the functional domain is a transcription activator or transcription repressor it is advantageous that additionally at least an NLS is provided and preferably at the N terminus. When more than one functional domain is included, the functional domains may be the same or different. The adaptor protein may utilize known linkers to attach such functional domains.

[0330] Thus, the modified dead gRNA, the (inactivated) Cas12b (with or without functional domains), and the binding protein with one or more functional domains, may each individually be comprised in a composition and administered to a host individually or collectively. Alternatively, these components may be provided in a single composition for administration to a host. Administration to a host may be performed via viral vectors known to the skilled person or described herein for delivery to a host (e.g. lentiviral vector, adenoviral vector, AAV vector). As explained herein, use of different selection markers (e.g. for lentiviral gRNA selection) and concentration of gRNA (e.g. dependent on whether multiple gRNAs are used) may be advantageous for eliciting an improved effect.

[0331] On the basis of this concept, several variations are appropriate to elicit a genomic locus event, including DNA cleavage, gene activation, or gene deactivation. Using the provided compositions, the person skilled in the art can advantageously and specifically target single or multiple loci with the same or different functional domains to elicit one or more genomic locus events. The compositions may be applied in a wide variety of methods for screening in libraries in cells and functional modeling in vivo (e.g. gene activation of lincRNA and identification of function; gain-of-function modeling; loss-of-function modeling; the use the compositions of the invention to establish cell lines and transgenic animals for optimization and screening purposes).

[0332] The current invention comprehends the use of the compositions of the current invention to establish and utilize conditional or inducible CRISPR transgenic cell/animals, which are not believed prior to the present invention or application. For example, the target cell comprises Cas12b conditionally or inducibly (e.g. in the form of Cre dependent constructs) and/or the adapter protein conditionally or inducibly and, on expression of a vector introduced into the target cell, the vector expresses that which induces or gives rise to the condition of Cas12b expression and/or adaptor expression in the target cell. By applying the teaching and compositions of the current invention with the known method of creating a CRISPR complex, inducible genomic events affected by functional domains are also an aspect of the current invention. One example of this is the creation of a CRISPR knock-in/conditional transgenic animal (e.g. mouse comprising e.g. a Lox-Stop-polyA-Lox(LSL) cassette) and subsequent delivery of one or more compositions providing one or more modified dead gRNA (e.g. −200 nucleotides to TSS of a target gene of interest for gene activation purposes) as described herein (e.g. modified dead gRNA with one or more aptamers recognized by coat proteins, e.g. MS2), one or more adapter proteins as described herein (MS2 binding protein linked to one or more VP64) and means for inducing the conditional animal (e.g. Cre recombinase for rendering Cas12b expression inducible). Alternatively, the adaptor protein may be provided as a conditional or inducible element with a conditional or inducible Cas12b to provide an effective model for screening purposes, which advantageously only requires minimal design and administration of specific dead gRNAs for a broad number of applications.

[0333] In another aspect the dead guides are further modified to improve specificity. Protected dead guides may be synthesized, whereby secondary structure is introduced into the 3′ end of the dead guide to improve its specificity. A protected guide RNA (pgRNA) comprises a guide sequence capable of hybridizing to a target sequence in a genomic locus of interest in a cell and a protector strand, wherein the protector strand is optionally complementary to the guide sequence and wherein the guide sequence may in part be hybridizable to the protector strand. The pgRNA optionally includes an extension sequence. The thermodynamics of the pgRNA-target DNA hybridization is determined by the number of bases complementary between the guide RNA and target DNA. By employing ‘thermodynamic protection’, specificity of dead gRNA can be improved by adding a protector sequence. For example, one method adds a complementary protector strand of varying lengths to the 3′ end of the guide sequence within the dead gRNA. As a result, the protector strand is bound to at least a portion of the dead gRNA and provides for a protected gRNA (pgRNA). In turn, the dead gRNA references herein may be easily protected using the described embodiments, resulting in pgRNA. The protector strand can be either a separate RNA transcript or strand or a chimeric version joined to the 3′ end of the dead gRNA guide sequence.

[0334] The inventors have shown that CRISPR enzymes as defined herein can employ more than one RNA guide without losing activity. This enables the use of the CRISPR enzymes, systems or complexes as defined herein for targeting multiple DNA targets, genes or gene loci, with a single enzyme, system or complex as defined herein. The guide RNAs may be tandemly arranged, optionally separated by a nucleotide sequence such as a direct repeat as defined herein. The position of the different guide RNAs is the tandem does not influence the activity. Multiplex CRISPR-Cas Systems

[0335] In one aspect, the invention provides a non-naturally occurring or engineered CRISPR enzyme, preferably a class 2 CRISPR enzyme, preferably a Type V or VI CRISPR enzyme as described herein, such as without limitation Cas12b as described herein elsewhere, used for tandem or multiplex targeting. It is to be understood that any of the CRISPR (or CRISPR-Cas or Cas) enzymes, complexes, or systems according to the invention as described herein elsewhere may be used in such an approach. Any of the methods, products, compositions and uses as described herein elsewhere are equally applicable with the multiplex or tandem targeting approach further detailed below. By means of further guidance, the following particular aspects and embodiments are provided.

[0336] In one aspect, the invention provides for the use of a Cas12b enzyme, complex or system as defined herein for targeting multiple gene loci. In one embodiment, this can be established by using multiple (tandem or multiplex) guide RNA (gRNA) sequences.

[0337] In one aspect, the invention provides methods for using one or more elements of a Cas12b enzyme, complex or system as defined herein for tandem or multiplex targeting, wherein said CRISP system comprises multiple guide RNA sequences. Preferably, said gRNA sequences are separated by a nucleotide sequence, such as a direct repeat as defined herein elsewhere.

[0338] The Cas12b enzyme, system or complex as defined herein provides an effective means for modifying multiple target polynucleotides. The Cas12b enzyme, system or complex as defined herein has a wide variety of utility including modifying (e.g., deleting, inserting, translocating, inactivating, activating) one or more target polynucleotides in a multiplicity of cell types. As such the Cas12b enzyme, system or complex as defined herein of the invention has a broad spectrum of applications in, e.g., gene therapy, drug screening, disease diagnosis, and prognosis, including targeting multiple gene loci within a single CRISPR system.

[0339] In one aspect, the invention provides a Cas12b enzyme, system or complex as defined herein, i.e. a Cas12b CRISPR-Cas complex having a Cas12b protein having at least one destabilization domain associated therewith, and multiple guide RNAs that target multiple nucleic acid molecules such as DNA molecules, whereby each of said multiple guide RNAs specifically targets its corresponding nucleic acid molecule, e.g., DNA molecule. Each nucleic acid molecule target, e.g., DNA molecule can encode a gene product or encompass a gene locus. Using multiple guide RNAs hence enables the targeting of multiple gene loci or multiple genes. In some embodiments the Cas12b enzyme may cleave the DNA molecule encoding the gene product. In some embodiments expression of the gene product is altered. The Cas12b protein and the guide RNAs do not naturally occur together. The invention comprehends the guide RNAs comprising tandemly arranged guide sequences. The invention further comprehends coding sequences for the Cas12b protein being codon optimized for expression in a eukaryotic cell. In a preferred embodiment the eukaryotic cell is a mammalian cell, a plant cell or a yeast cell and in a more preferred embodiment the mammalian cell is a human cell. Expression of the gene product may be decreased. The Cas12b enzyme may form part of a CRISPR system or complex, which further comprises tandemly arranged guide RNAs (gRNAs) comprising a series of 2, 3, 4, 5, 6, 7, 8, 9, 10, 15, 25, 25, 30, or more than 30 guide sequences, each capable of specifically hybridizing to a target sequence in a genomic locus of interest in a cell. In some embodiments, the functional Cas12b CRISPR system or complex binds to the multiple target sequences. In some embodiments, the functional CRISPR system or complex may edit the multiple target sequences, e.g., the target sequences may comprise a genomic locus, and in some embodiments there may be an alteration of gene expression. In some embodiments, the functional CRISPR system or complex may comprise further functional domains. In some embodiments, the invention provides a method for altering or modifying expression of multiple gene products. The method may comprise introducing into a cell containing said target nucleic acids, e.g., DNA molecules, or containing and expressing target nucleic acid, e.g., DNA molecules; for instance, the target nucleic acids may encode gene products or provide for expression of gene products (e.g., regulatory sequences).

[0340] In preferred embodiments the CRISPR enzyme used for multiplex targeting is Cas12b, or the CRISPR system or complex comprises Cas12b. In some embodiments, the Cas12b enzyme used for multiplex targeting cleaves both strands of DNA to produce a double strand break (DSB). In some embodiments, the CRISPR enzyme used for multiplex targeting is a nickase. In some embodiments, the Cas12b enzyme used for multiplex targeting is a dual nickase. In some embodiments, the Cas12b enzyme used for multiplex targeting is a Cas12b enzyme such as a DD Cas12b enzyme as defined herein elsewhere.

[0341] In some general embodiments, the Cas12b enzyme used for multiplex targeting is associated with one or more functional domains. In some more specific embodiments, the CRISPR enzyme used for multiplex targeting is a deadCas12b as defined herein elsewhere.

[0342] In an aspect, the present invention provides a means for delivering the Cas12b enzyme, system or complex for use in multiple targeting as defined herein or the polynucleotides defined herein. Non-limiting examples of such delivery means are e.g. particle(s) delivering component(s) of the complex, vector(s) comprising the polynucleotide(s) discussed herein (e.g., encoding the CRISPR enzyme, providing the nucleotides encoding the CRISPR complex). In some embodiments, the vector may be a plasmid or a viral vector such as AAV, or lentivirus. Transient transfection with plasmids, e.g., into HEK cells may be advantageous, especially given the size limitations of AAV and that while Cas12b fits into AAV, one may reach an upper limit with additional guide RNAs.

[0343] Also provided is a model that constitutively expresses the Cas12b enzyme, complex or system as used herein for use in multiplex targeting. The organism may be transgenic and may have been transfected with the present vectors or may be the offspring of an organism so transfected. In a further aspect, the present invention provides compositions comprising the CRISPR enzyme, system and complex as defined herein or the polynucleotides or vectors described herein. Also provides are Cas12b CRISPR systems or complexes comprising multiple guide RNAs, preferably in a tandemly arranged format. Said different guide RNAs may be separated by nucleotide sequences such as direct repeats.

[0344] Also provided is a method of treating a subject, e.g., a subject in need thereof, comprising inducing gene editing by transforming the subject with the polynucleotide encoding the Cas12b CRISPR system or complex or any of polynucleotides or vectors described herein and administering them to the subject. A suitable repair template may also be provided, for example delivered by a vector comprising said repair template. Also provided is a method of treating a subject, e.g., a subject in need thereof, comprising inducing transcriptional activation or repression of multiple target gene loci by transforming the subject with the polynucleotides or vectors described herein, wherein said polynucleotide or vector encodes or comprises the Cas12b enzyme, complex or system comprising multiple guide RNAs, preferably tandemly arranged. Where any treatment is occurring ex vivo, for example in a cell culture, then it will be appreciated that the term ‘subject’ may be replaced by the phrase “cell or cell culture.”

[0345] Compositions comprising Cas12b enzyme, complex or system comprising multiple guide RNAs, preferably tandemly arranged, or the polynucleotide or vector encoding or comprising said Cas12b enzyme, complex or system comprising multiple guide RNAs, preferably tandemly arranged, for use in the methods of treatment as defined herein elsewhere are also provided. A kit of parts may be provided including such compositions. Uses of said composition in the manufacture of a medicament for such methods of treatment are also provided. Use of a Cas12b CRISPR system in screening is also provided by the present invention, e.g., gain of function screens. Cells which are artificially forced to overexpress a gene are be able to down regulate the gene over time (re-establishing equilibrium) e.g. by negative feedback loops. By the time the screen starts the unregulated gene might be reduced again. Using an inducible Cas12b activator allows one to induce transcription right before the screen and therefore minimizes the chance of false negative hits. Accordingly, by use of the instant invention in screening, e.g., gain of function screens, the chance of false negative results may be minimized.

[0346] In one aspect, the invention provides an engineered, non-naturally occurring CRISPR system comprising a Cas12b protein and multiple guide RNAs that each specifically target a DNA molecule encoding a gene product in a cell, whereby the multiple guide RNAs each target their specific DNA molecule encoding the gene product and the Cas12b protein cleaves the target DNA molecule encoding the gene product, whereby expression of the gene product is altered; and, wherein the CRISPR protein and the guide RNAs do not naturally occur together. The invention comprehends the multiple guide RNAs comprising multiple guide sequences, preferably separated by a nucleotide sequence such as a direct repeat and optionally fused to a tracr sequence. In an embodiment of the invention the CRISPR protein is a type V or VI CRISPR-Cas protein and in a more preferred embodiment the CRISPR protein is a Cas12b protein. The invention further comprehends a Cas12b protein being codon optimized for expression in a eukaryotic cell. In a preferred embodiment the eukaryotic cell is a mammalian cell and in a more preferred embodiment the mammalian cell is a human cell. In a further embodiment of the invention, the expression of the gene product is decreased.

### Modifying a Target Sequence

[0347] In certain embodiments, the locus of interest is modified by the CRISPR-C2c1 complex by inserting, or “knocking-in” a template DNA sequence. In particular embodiments, the DNA insert is designed to integrate into the genome in the proper orientation. In preferred embodiments, the locus of interest is modified by the CRISPR-C2c1 system in non-dividing cells, where genome editing via homology-directed repair (HDR) mechanisms are especially challenging (Chan et al., Nucleic acids research. 2011; 39:5955-5966). Maresca et al. (Genome Res. 2013 March; 23(3): 539-546) described a method of site directed, precise insertion applicable with zinc finger nucleases (ZFNs) and Tale nucleases (TALENs) wherein short, double-stranded DNAs with 5′ overhangs were ligated to complementary ends, which allowed precise insertion of 15-kb exogeneous expression cassette at defined locus in human cell lines. He et al. (Nucleic Acids Res. 2016 May 19; 44(9)) described CRISPR/Cas9-induced site-specific knock-in of a 4.6 kb promoterless ires-eGFP fragment into the GAPDH locus yielded up to 20% GFP+ cells in somatic LO2 cells, and 1.70% GFP+ cells in human embryonic stem cells mediated by the NHEJ pathway and also reported that the NHEJ-based knock-in is more efficient than HDR-mediated gene targeting in all human cell types examined. Because C2c1 generates a staggered cut with a 5′ overhang, one with ordinary skill in the art could use the methods similar to that as described in Meresca et al. and He et al. to generate exogenous DNA insertions at a locus of interest with the CRISPR-C2c1 system disclosed herein.

[0348] In certain embodiments, the locus of interest is first modified by the CRISPR-C2c1 system at the distal end of the PAM sequence, and further modified by the CRISPR-C2c1 system near the PAM sequence and repaired via HDR. In certain embodiments, the locus of interest is modified by the CRISPR-C2c1 system by introducing a mutation, deletion, or insertion of exogenous DNA sequence via HDR. In some embodiments, the locus of interest is modified by the CRISPR-C2c1 system by introducing a mutation, deletion, or insertion of exogenous DNA sequence via NHEJ. In preferred embodiments, the exogenous DNA is flanked by single guide DNA-PAM sequences on both 3′ and 5′ ends. In preferred embodiments, the exogenous DNA is released after CRISPR-C2c1 cleavage. See Zhang et al., Genome Biology 201718:35; He et al., Nucleic Acids Research, 44: 9, 2016.

### Template

[0349] In some embodiments, a recombination template is also provided. A recombination template may be a component of another vector as described herein, contained in a separate vector, or provided as a separate polynucleotide. In some embodiments, a recombination template is designed to serve as a template in homologous recombination, such as within or near a target sequence nicked or cleaved by a nucleic acid-targeting effector protein as a part of a nucleic acid-targeting complex. In some examples, the system comprises a recombination template. The recombination template may be inserted by homology-directed repair (HDR).

[0350] In an embodiment, the template nucleic acid alters the sequence of the target position. In an embodiment, the template nucleic acid results in the incorporation of a modified, or non-naturally occurring base into the target nucleic acid.

[0351] The template sequence may undergo a breakage mediated or catalyzed recombination with the target sequence. In an embodiment, the template nucleic acid may include sequence that corresponds to a site on the target sequence that is cleaved by an C2c1 mediated cleavage event. In an embodiment, the template nucleic acid may include sequence that corresponds to both, a first site on the target sequence that is cleaved in a first C2c1 mediated event, and a second site on the target sequence that is cleaved in a second C2c1 mediated event.

[0352] In certain embodiments, the template nucleic acid can include sequence which results in an alteration in the coding sequence of a translated sequence, e.g., one which results in the substitution of one amino acid for another in a protein product, e.g., transforming a mutant allele into a wild type allele, transforming a wild type allele into a mutant allele, and/or introducing a stop codon, insertion of an amino acid residue, deletion of an amino acid residue, or a nonsense mutation. In certain embodiments, the template nucleic acid can include sequence which results in an alteration in a non-coding sequence, e.g., an alteration in an exon or in a 5′ or 3′ non-translated or non-transcribed region. Such alterations include an alteration in a control element, e.g., a promoter, enhancer, and an alteration in a cis-acting or trans-acting control element.

[0353] A template nucleic acid having homology with a target position in a target gene may be used to alter the structure of a target sequence. The template sequence may be used to alter an unwanted structure, e.g., an unwanted or mutant nucleotide. The template nucleic acid may include sequence which, when integrated, results in: decreasing the activity of a positive control element; increasing the activity of a positive control element; decreasing the activity of a negative control element; increasing the activity of a negative control element; decreasing the expression of a gene; increasing the expression of a gene; increasing resistance to a disorder or disease; increasing resistance to viral entry; correcting a mutation or altering an unwanted amino acid residue conferring, increasing, abolishing or decreasing a biological property of a gene product, e.g., increasing the enzymatic activity of an enzyme, or increasing the ability of a gene product to interact with another molecule.

[0354] The template nucleic acid may include sequence which results in: a change in sequence of 1, 2, 3, 4, 5, 6, 7, 8, 9, 10, 1 1, 12 or more nucleotides of the target sequence.

[0355] A template polynucleotide may be of any suitable length, such as about or more than about 10, 15, 20, 25, 50, 75, 100, 150, 200, 500, 1000, or more nucleotides in length. In an embodiment, the template nucleic acid may be 20+/−10, 30+/−10, 40+/−10, 50+/−10, 60+/−10, 70+/−10, 80+/−10, 90+/−10, 100+/−10, 1 10+/−10, 120+/−10, 130+/−10, 140+/−10, 150+/−10, 160+/−10, 170+/−10, 1 80+/−10, 190+/−10, 200+/−10, 210+/−10, of 220+/−10 nucleotides in length. In an embodiment, the template nucleic acid may be 30+/−20, 40+/−20, 50+/−20, 60+/−20, 70+/−20, 80+/−20, 90+/−20, 100+/−20, 1 10+/−20, 120+/−20, 130+/−20, 140+/−20, I50+/−20, 160+/−20, 170+/−20, 180+/−20, 190+/−20, 200+/−20, 210+/−20, of 220+/−20 nucleotides in length. In an embodiment, the template nucleic acid is 10 to 1,000, 20 to 900, 30 to 800, 40 to 700, 50 to 600, 50 to 500, 50 to 400, 50 to 300, 50 to 200, or 50 to 100 nucleotides in length.

[0356] In some embodiments, the template polynucleotide is complementary to a portion of a polynucleotide comprising the target sequence. When optimally aligned, a template polynucleotide might overlap with one or more nucleotides of a target sequences (e.g. about or more than about 1, 5, 10, 15, 20, 25, 30, 35, 40, 45, 50, 60, 70, 80, 90, 100 or more nucleotides). In some embodiments, when a template sequence and a polynucleotide comprising a target sequence are optimally aligned, the nearest nucleotide of the template polynucleotide is within about 1, 5, 10, 15, 20, 25, 50, 75, 100, 200, 300, 400, 500, 1000, 5000, 10000, or more nucleotides from the target sequence.

[0357] The exogenous polynucleotide template comprises a sequence to be integrated (e.g., a mutated gene). The sequence for integration may be a sequence endogenous or exogenous to the cell. Examples of a sequence to be integrated include polynucleotides encoding a protein or a non-coding RNA (e.g., a microRNA). Thus, the sequence for integration may be operably linked to an appropriate control sequence or sequences. Alternatively, the sequence to be integrated may provide a regulatory function.

[0358] An upstream or downstream sequence may comprise from about 20 bp to about 2500 bp, for example, about 50, 100, 200, 300, 400, 500, 600, 700, 800, 900, 1000, 1100, 1200, 1300, 1400, 1500, 1600, 1700, 1800, 1900, 2000, 2100, 2200, 2300, 2400, or 2500 bp. In some methods, the exemplary upstream or downstream sequence have about 200 bp to about 2000 bp, about 600 bp to about 1000 bp, or more particularly about 700 bp to about 1000.

[0359] An upstream or downstream sequence may comprise from about 20 bp to about 2500 bp, for example, about 50, 100, 200, 300, 400, 500, 600, 700, 800, 900, 1000, 1100, 1200, 1300, 1400, 1500, 1600, 1700, 1800, 1900, 2000, 2100, 2200, 2300, 2400, or 2500 bp. In some methods, the exemplary upstream or downstream sequence have about 200 bp to about 2000 bp, about 600 bp to about 1000 bp, or more particularly about 700 bp to about 1000

[0360] In certain embodiments, one or both homology arms may be shortened to avoid including certain sequence repeat elements. For example, a 5′ homology arm may be shortened to avoid a sequence repeat element. In other embodiments, a 3′ homology arm may be shortened to avoid a sequence repeat element. In some embodiments, both the 5′ and the 3′ homology arms may be shortened to avoid including certain sequence repeat elements.

[0361] In some methods, the exogenous polynucleotide template may further comprise a marker. Such a marker may make it easy to screen for targeted integrations. Examples of suitable markers include restriction sites, fluorescent proteins, or selectable markers. The exogenous polynucleotide template of the invention can be constructed using recombinant techniques (see, for example, Sambrook et al., 2001 and Ausubel et al., 1996).

[0362] In certain embodiments, a template nucleic acid for correcting a mutation may designed for use as a single-stranded oligonucleotide. When using a single-stranded oligonucleotide, 5′ and 3′ homology arms may range up to about 200 base pairs (bp) in length, e.g., at least 25, 50, 75, 100, 125, 150, 175, or 200 bp in length.

[0363] Suzuki et al. describe in vivo genome editing via CRISPR/Cas9 mediated homology-independent targeted integration (2016, Nature 540:144-149).

[0364] Accordingly, when referring to the CRISPR system herein, in some aspects or embodiments, the CRISPR system comprises (i) a CRISPR protein or a polynucleotide encoding a CRISPR effector protein and (ii) one or more polynucleotides engineered to: complex with the CRISPR protein to form a CRISPR complex; and to complex with the target sequence.

[0365] In some embodiments, the therapeutic is for delivery (or application or administration) to a eukaryotic cell, either in vivo or ex vivo.

[0366] In some embodiments, the CRISPR protein is a nuclease directing cleavage of one or both strands at the location of the target sequence, or wherein the CRISPR protein is a nickase directing cleavage at the location of the target sequence.

[0367] In some embodiments, the CRISPR protein is a C2c1 protein complexed with a CRISPR-Cas system RNA polynucleotide sequence, wherein the polynucleotide sequence comprises: a) a guide RNA polynucleotide capable of hybridizing to a target HBV sequence; and (b) a direct repeat RNA polynucleotide.

[0368] In some embodiments, the CRISPR protein is a C2c1, and the system comprises: I. a CRISPR-Cas system RNA polynucleotide sequence, wherein the polynucleotide sequence comprises: (a) a guide RNA polynucleotide capable of hybridizing to a target sequence, and (b) a direct repeat RNA polynucleotide, and II. a polynucleotide sequence encoding the C2c1, optionally comprising at least one or more nuclear localization sequences, wherein the direct repeat sequence hybridizes to the guide sequence and directs sequence-specific binding of a CRISPR complex to the target sequence, and wherein the CRISPR complex comprises the CRISPR protein complexed with (1) the guide sequence that is hybridized or hybridizable to the target sequence, and (2) the direct repeat sequence, and the polynucleotide sequence encoding a CRISPR protein is DNA or RNA.

[0369] The invention also provides a method of modifying a locus of interest in a cell comprising contacting the cell with any of the herein-described engineered CRISPR enzymes (e.g. engineered Cas effector module), compositions or any of the herein-described systems or vector systems, or wherein the cell comprises any of the herein-described CRISPR complexes present within the cell. In such methods the cell may be a prokaryotic or eukaryotic cell, preferably a eukaryotic cell. In such methods, an organism may comprise the cell. In such methods the organism may not be a human or other animal. In certain embodiments, the cell may comprise an A/T rich genome. In some embodiments, the cell genome comprises T-rich PAMs. In particular embodiments, the PAM is 5′-TTN-3′ or 5′-ATTN-3′. In a particular embodiment, the PAM is 5′-TTG-3′. In a particular embodiment, the cell is a Plasmodium falciparum cell.

[0370] In some embodiments, the CRISPR effector protein is a C2c1 protein. C2c1 creates double strand breaks at the distal end of PAM, in contrast to cleavage at the proximal end of PAM created by Cas9 (Jinek et al., 2012; Cong et al., 2013). It is proposed that Cpf1 mutated target sequences may be susceptible to repeated cleavage by a single gRNA, hence promoting Cpf1's application in HDR mediated genome editing (Front Plant Sci. 2016 Nov. 14; 7:1683). Cpf1 and C2c1 are both Type V CRISPR-Cas proteins that share structure similarity. Unlike Cas9, which generates blunt cuts at the proximal end of PAM, Cpf1 and C2c1 generate staggered cuts at the distal end of PAM. Accordingly, in certain embodiments, the locus of interest is modified by the CRISPR-C2c1 complex via homology directed repair (HR or HDR). In certain embodiments, the locus of interest is modified by the CRISPR-C2c1 complex independent of HR. In certain embodiments, the locus of interest is modified by the CRISPR-C2c1 complex via non-homologous end joining (NHEJ).

[0371] C2c1 generates a staggered cut with a 5′ overhang, in contrast to the blunt ends generated by Cas9 (Garneau et al., Nature. 2010; 468:67-71; Gasiunas et al., Proc Natl Acad Sci USA. 2012; 109:E2579-2586). This structure of the cleavage product could be particularly advantageous for facilitating non-homologous end joining (NHEJ)-based gene insertion into the mammalian genome (Maresca et al., Genome research. 2013; 23:539-546).

[0372] In certain embodiments, the locus of interest is modified by the CRISPR-C2c1 complex by inserting, or “knocking-in” a template DNA sequence. In particular embodiments, the DNA insert is designed to integrate into the genome in the proper orientation. In preferred embodiments, the locus of interest is modified by the CRISPR-C2c1 system in non-dividing cells, where genome editing via homology-directed repair (HDR) mechanisms are especially challenging (Chan et al., Nucleic acids research. 2011; 39:5955-5966). Maresca et al. (Genome Res. 2013 March; 23(3): 539-546) described a method of site directed, precise insertion applicable with zinc finger nucleases (ZFNs) and Tale nucleases (TALENs) wherein short, double-stranded DNAs with 5′ overhangs were ligated to complementary ends, which allowed precise insertion of 15-kb exogeneous expression cassette at defined locus in human cell lines. He et al. (Nucleic Acids Res. 2016 May 19; 44(9)) described CRISPR/Cas9-induced site-specific knock-in of a 4.6 kb promoterless ires-eGFP fragment into the GAPDH locus yielded up to 20% GFP+ cells in somatic LO2 cells, and 1.70% GFP+ cells in human embryonic stem cells mediated by the NHEJ pathway and also reported that the NHEJ-based knock-in is more efficient than HDR-mediated gene targeting in all human cell types examined. Because C2c1 generates a staggered cut with a 5′ overhang, one with ordinary skill in the art could use the methods similar to that as described in Meresca et al. and He et al. to generate exogenous DNA insertions at a locus of interest with the CRISPR-C2c1 system disclosed herein.

[0373] In certain embodiments, the locus of interest is first modified by the CRISPR-C2c1 system at the distal end of the PAM sequence, and further modified by the CRISPR-C2c1 system near the PAM sequence and repaired via HDR. In certain embodiments, the locus of interest is modified by the CRISPR-C2c1 system by introducing a mutation, deletion, or insertion of exogenous DNA sequence via HDR. In some embodiments, the locus of interest is modified by the CRISPR-C2c1 system by introducing a mutation, deletion, or insertion of exogenous DNA sequence via NHEJ. In preferred embodiments, the exogenous DNA is flanked by single guide DNA (sgDNA)-PAM sequences on both 3′ and 5′ ends. In preferred embodiments, the exogenous DNA is released after CRISPR-C2c1 cleavage. See Zhang et al., Genome Biology 201718:35; He et al., Nucleic Acids Research, 44: 9, 2016.

[0374] In some embodiments, the CRISPR protein is a C2c from Alicyclobacillus acidoterrestris ATCC 49025 or Bacillus thermoamylovorans strain B4166.

[0375] The invention also provides for the nucleotide sequence encoding the effector protein being codon optimized for expression in a eukaryote or eukaryotic cell in any of the herein described methods or compositions. In an embodiment of the invention, the codon optimized effector protein is any C2c1 discussed herein and is codon optimized for operability in a eukaryotic cell or organism, e.g., such cell or organism as elsewhere herein mentioned, for instance, without limitation, a yeast cell, or a mammalian cell or organism, including a mouse cell, a rat cell, and a human cell or non-human eukaryote organism, e.g., plant.

[0376] In some embodiments, the CRISPR protein further comprises one or more nuclear localization signals (NLSs) capable of driving the accumulation of the CRISPR protein to a detectible amount in the nucleus of the cell of the organism.

[0377] In certain embodiments of the invention, at least one nuclear localization signal (NLS) is attached to the nucleic acid sequences encoding the C2c1 effector proteins. In preferred embodiments at least one or more C-terminal or N-terminal NLSs are attached (and hence nucleic acid molecule(s) coding for the C2c1 effector protein can include coding for NLS(s) so that the expressed product has the NLS(s) attached or connected). In a preferred embodiment a C-terminal NLS is attached for optimal expression and nuclear targeting in eukaryotic cells, preferably human cells. In a preferred embodiment, the codon optimized effector protein is C2c1 and the spacer length of the guide RNA is from 15 to 35 nt. In certain embodiments, the spacer length of the guide RNA is at least 16 nucleotides, such as at least 17 nucleotides. In certain embodiments, the spacer length is from 15 to 17 nt, from 17 to 20 nt, from 20 to 24 nt, eg. 20, 21, 22, 23, or 24 nt, from 23 to 25 nt, e.g., 23, 24, or 25 nt, from 24 to 27 nt, from 27-30 nt, from 30-35 nt, or 35 nt or longer. In certain embodiments of the invention, the codon optimized effector protein is C2c1 and the direct repeat length of the guide RNA is at least 16 nucleotides. In certain embodiments, the codon optimized effector protein is C2c1 and the direct repeat length of the guide RNA is from 16 to 20 nt, e.g., 16, 17, 18, 19, or 20 nucleotides. In certain preferred embodiments, the direct repeat length of the guide RNA is 19 nucleotides.

[0378] In some embodiments, the CRISPR protein comprises one or more mutations.

[0379] In some embodiments, he CRISPR protein has one or more mutations in a catalytic domain, and wherein the protein further comprises one or more functional domains.

[0380] In some embodiments, the CRISPR system is comprised within a delivery system, optionally: a vector system comprising one or more vectors, optionally wherein the vectors comprise one or more viral vectors, optionally wherein the one or more viral vectors comprise one or more lentiviral, adenoviral or adeno-associated viral (AAV) vectors; or a particle or lipid particle, optionally wherein the CRISPR protein is complexed with the polynucleotides to form the CRISPR complex.

[0381] In some embodiments, the system, complex or protein is for use in a method of modifying an organism or a non-human organism by manipulation of a target sequence in a genomic locus of interest.

[0382] In some embodiments, the polynucleotides encoding the sequence encoding or providing the CRISPR system are delivered via liposomes, particles, cell penetrating peptides, exosomes, microvesicles, or a gene-gun. In some embodiments, a delivery system is included. In some embodiments, the delivery system comprises: a vector system comprising one or more vectors comprising the engineered polynucleotides and polynucleotide encoding the CRISPR protein, optionally wherein the vectors comprise one or more viral vectors, optionally wherein the one or more viral vectors comprise one or more lentiviral, adenoviral or adeno-associated viral (AAV) vectors; or a particle or lipid particle, containing the CRISPR system or the CRISPR complex.

[0383] In some embodiments, a recombination/repair template is provided.

[0384] The methods according to the invention as described herein comprehend inducing one or more mutations in a eukaryotic cell (in vitro, i.e. in an isolated eukaryotic cell) as herein discussed comprising delivering to cell a vector as herein discussed. The mutation(s) can include the introduction, deletion, or substitution of one or more nucleotides at each target sequence of cell(s) via the guide(s) RNA(s) or sgRNA(s). The mutations can include the introduction, deletion, or substitution of 1-75 nucleotides at each target sequence of said cell(s) via the guide(s) RNA(s) or sgRNA(s). The mutations can include the introduction, deletion, or substitution of 1, 5, 10, 11, 12, 13, 14, 15, 16, 17, 18, 19, 20, 21, 22, 23, 24, 25, 26, 27, 28, 29, 30, 35, 40, 45, 50, or 75 nucleotides at each target sequence of said cell(s) via the guide(s) RNA(s) or sgRNA(s). The mutations can include the introduction, deletion, or substitution of 5, 10, 11, 12, 13, 14, 15, 16, 17, 18, 19, 20, 21, 22, 23, 24, 25, 26, 27, 28, 29, 30, 35, 40, 45, 50, or 75 nucleotides at each target sequence of said cell(s) via the guide(s) RNA(s) or sgRNA(s). The mutations include the introduction, deletion, or substitution of 10, 11, 12, 13, 14, 15, 16, 17, 18, 19, 20, 21, 22, 23, 24, 25, 26, 27, 28, 29, 30, 35, 40, 45, 50, or 75 nucleotides at each target sequence of said cell(s) via the guide(s) RNA(s) or sgRNA(s). The mutations can include the introduction, deletion, or substitution of 20, 21, 22, 23, 24, 25, 26, 27, 28, 29, 30, 35, 40, 45, 50, or 75 nucleotides at each target sequence of said cell(s) via the guide(s) RNA(s) or sgRNA(s). The mutations can include the introduction, deletion, or substitution of 40, 45, 50, 75, 100, 200, 300, 400 or 500 nucleotides at each target sequence of said cell(s) via the guide(s) RNA(s) or sgRNA(s).

[0385] For minimization of toxicity and off-target effect, it may be important to control the concentration of Cas mRNA and guide RNA delivered. Optimal concentrations of Cas mRNA and guide RNA can be determined by testing different concentrations in a cellular or non-human eukaryote animal model and using deep sequencing the analyze the extent of modification at potential off-target genomic loci. Alternatively, to minimize the level of toxicity and off-target effect, Cas nickase mRNA (for example S. pyogenes Cas9 with the D10A mutation) can be delivered with a pair of guide RNAs targeting a site of interest. Guide sequences and strategies to minimize toxicity and off-target effects can be as in WO 2014/093622 (PCT/US2013/074667); or, via mutation as herein.

[0386] Typically, in the context of an endogenous CRISPR system, formation of a CRISPR complex (comprising a guide sequence hybridized to a target sequence and complexed with one or more Cas proteins) results in cleavage of one or both strands in or near (e.g. within 1, 2, 3, 4, 5, 6, 7, 8, 9, 10, 20, 50, or more base pairs from) the target sequence. Without wishing to be bound by theory, the tracr sequence, which may comprise or consist of all or a portion of a wild-type tracr sequence (e.g. about or more than about 20, 26, 32, 45, 48, 54, 63, 67, 85, or more nucleotides of a wild-type tracr sequence), may also form part of a CRISPR complex, such as by hybridization along at least a portion of the tracr sequence to all or a portion of a tracr mate sequence that is operably linked to the guide sequence.

### Engineered CRISPR-Cas Systems

[0387] In general, CRISPRs (Clustered Regularly Interspaced Short Palindromic Repeats), also known as SPIDRs (SPacer Interspersed Direct Repeats), constitute a family of DNA loci that are usually specific to a particular bacterial species. The CRISPR locus comprises a distinct class of interspersed short sequence repeats (SSRs) that were recognized in E. coli (Ishino et al., J. Bacteriol., 169:5429-5433 [1987]; and Nakata et al., J. Bacteriol., 171:3553-3556 [1989]), and associated genes. Similar interspersed SSRs have been identified in Haloferax mediterranei, Streptococcus pyogenes, Anabaena, and Mycobacterium tuberculosis (See, Groenen et al., Mol. Microbiol., 10:1057-1065 [1993]; Hoe et al., Emerg. Infect. Dis., 5:254-263 [1999]; Masepohl et al., Biochim. Biophys. Acta 1307:26-30 [1996]; and Mojica et al., Mol. Microbiol., 17:85-93 [1995]). The CRISPR loci typically differ from other SSRs by the structure of the repeats, which have been termed short regularly spaced repeats (SRSRs) (Janssen et al., OMICS J. Integ. Biol., 6:23-33 [2002]; and Mojica et al., Mol. Microbiol., 36:244-246 [2000]). In general, the repeats are short elements that occur in clusters that are regularly spaced by unique intervening sequences with a substantially constant length (Mojica et al., [2000], supra). Although the repeat sequences are highly conserved between strains, the number of interspersed repeats and the sequences of the spacer regions typically differ from strain to strain (van Embden et al., J. Bacteriol., 182:2393-2401 [2000]). CRISPR loci have been identified in more than 40 prokaryotes (See e.g., Jansen et al., Mol. Microbiol., 43:1565-1575 [2002]; and Mojica et al., [2005]) including, but not limited to Aeropyrum, Pyrobaculum, Sulfolobus, Archaeoglobus, Halocarcula, Methanobacterium, Methanococcus, Methanosarcina, Methanopyrus, Pyrococcus, Picrophilus, Thermoplasma, Corynebacterium, Mycobacterium, Streptomyces, Aquifex, Porphyromonas, Chlorobium, Thermus, Bacillus, Listeria, Staphylococcus, Clostridium, Thermoanaerobacter, Mycoplasma, Fusobacterium, Azarcus, Chromobacterium, Neisseria, Nitrosomonas, Desulfovibrio, Geobacter, Myxococcus, Campylobacter, Wolinella, Acinetobacter, Erwinia, Escherichia, Legionella, Methylococcus, Pasteurella, Photobacterium, Salmonella, Xanthomonas, Yersinia, Treponema, and Thermotoga.

### Collateral Activity

[0388] Cas12 enzymes may possess collateral activity, that is in certain environment, an activated Cas12 enzyme remains active following binding of a target sequence and continues to non-specifically cleave non-target oligonucleotides. This guide molecule-programmed collateral cleavage activity provides an ability to use Cas12b systems to detect the presence of a specific target oligonucleotide to trigger in vivo programmed cell death or in vitro non-specific RNA degradation that can serve as a readouts. (Abudayyeh et al. 2016; East-Seletsky et al, 2016).

[0389] The programmability, specificity, and collateral activity of the RNA-guided C2c1 also make it an ideal switchable nuclease for non-specific cleavage of nucleic acids. In one embodiment, a C2c1 system is engineered to provide and take advantage of collateral non-specific cleavage of nucleic acids, such as ssDNA. In another embodiment, a C2c1 system is engineered to provide and take advantage of collateral non-specific cleavage of ssDNA. Accordingly, engineered C2c1 systems provide platforms for nucleic acid detection and transcriptome manipulation, and inducing cell death. C2c1 is developed for use as a mammalian transcript knockdown and binding tool. C2c1 is capable of robust collateral cleavage of RNA and ssDNA when activated by sequence-specific targeted DNA binding.

[0390] In certain embodiments, C2c1 is provided or expressed in an in vitro system or in a cell, transiently or stably, and targeted or triggered to non-specifically cleave cellular nucleic acids. In one embodiment, C2c1 is engineered to knock down ssDNA, for example viral ssDNA. In another embodiment, C2c1 is engineered to knock down RNA. The system can be devised such that the knockdown is dependent on a target DNA present in the cell or in vitro system, or triggered by the addition of a target nucleic acid to the system or cell.

[0391] In an embodiment, the C2c1 system is engineered to non-specifically cleave RNA in a subset of cells distinguishable by the presence of an aberrant DNA sequence, for instance where cleavage of the aberrant DNA might be incomplete or ineffectual. In one non-limiting example, a DNA translocation that is present in a cancer cell and drives cell transformation is targeted. Whereas a subpopulation of cells that undergoes chromosomal DNA and repair may survive, non-specific collateral ribonuclease activity advantageously leads to cell death of potential survivors.

[0392] Collateral activity was recently leveraged for a highly sensitive and specific nucleic acid detection platform termed SHERLOCK that is useful for many clinical diagnoses (Gootenberg, J. S. et al. Nucleic acid detection with CRISPR-Cas13a/C2c2. Science 356, 438-442 (2017)).

[0393] According to the invention, engineered C2c1 systems are optimized for DNA or RNA endonuclease activity and can be expressed in mammalian cells and targeted to effectively knock down reporter molecules or transcripts in cells.

[0394] The collateral effect of engineered C2c1 with isothermal amplification provides a CRISPR-based diagnostic providing rapid DNA or RNA detection with high sensitivity and single-base mismatch specificity. The C2c1-based molecular detection platform is used to detect specific strains of virus, distinguish pathogenic bacteria, genotype human DNA, and identify cell-free tumor DNA mutations. Furthermore, reaction reagents can be lyophilized for cold-chain independence and long-term storage, and readily reconstituted on paper for field applications.

[0395] The ability to rapidly detect nucleic acids with high sensitivity and single-base specificity on a portable platform may aid in disease diagnosis and monitoring, epidemiology, and general laboratory tasks. Although methods exist for detecting nucleic acids, they have trade-offs among sensitivity, specificity, simplicity, cost, and speed.

[0396] Microbial Clustered Regularly Interspaced Short Palindromic Repeats (CRISPR) and CRISPR-associated (CRISPR-Cas) adaptive immune systems contain programmable endonucleases that can be leveraged for CRISPR-based diagnostics (CRISPR-Dx). C2c1 (also known as Cas12b), can be reprogrammed with CRISPR RNAs (crRNAs) to provide a platform for specific DNA sensing. Upon recognition of its DNA target, activated C2c1 engages in “collateral” cleavage of nearby non-targeted nucleic acids (i.e., RNA and/or ssDNA). This crRNA-programmed collateral cleavage activity allows C2c1 to detect the presence of a specific DNA in vivo by triggering programmed cell death or by nonspecific degradation of labeled RNA or ssDNA. Here is described an in vitro nucleic acid detection platform with high sensitivity based on nucleic acid amplification and C2c1-mediated collateral cleavage of a commercial reporter RNA, allowing for real-time detection of the target.

[0397] In certain example embodiments, the orthologues disclosed herein may be used alone, or in combination with other Cas12 or Cas13 orthologues in diagnostic compositions and assays. For example, the Cas12b orthologues disclosed herein may be used in multiplex assays to detect a target sequence, and then through non-specific cleavage of an oligonucleotide-based reporter, generate a detectable signal.

### Reporter/Masking Constructs

[0398] As used herein, a “masking construct” refers to a molecule that can be cleaved or otherwise deactivated by an activated CRISPR system effector protein described herein. The term “masking construct” may also be referred to in the alternative as a “detection construct.” Depending on the nuclease activity of the CRISPR effector protein, the masking construct may be a RNA-based masking construct or a DNA-based masking construct. The Nucleic Acid-based masking constructs comprises a nucleic acid element that is cleavable by a CRISPR effector protein. Cleavage of the nucleic acid element releases agents or produces conformational changes that allow a detectable signal to be produced. Example constructs demonstrating how the nucleic acid element may be used to prevent or mask generation of detectable signal are described below and embodiments of the invention comprise variants of the same. Prior to cleavage, or when the masking construct is in an ‘active’ state, the masking construct blocks the generation or detection of a positive detectable signal. It will be understood that in certain example embodiments a minimal background signal may be produced in the presence of an active masking construct. A positive detectable signal may be any signal that can be detected using optical, fluorescent, chemiluminescent, electrochemical or other detection methods known in the art. The term “positive detectable signal” is used to differentiate from other detectable signals that may be detectable in the presence of the masking construct. For example, in certain embodiments a first signal may be detected when the masking agent is present (i.e. a negative detectable signal), which then converts to a second signal (e.g. the positive detectable signal) upon detection of the target molecules and cleavage or deactivation of the masking agent by the activated CRISPR effector protein.

[0399] In certain example embodiments, the masking construct may suppress generation of a gene product. The gene product may be encoded by a reporter construct that is added to the sample. The masking construct may be an interfering RNA involved in a RNA interference pathway, such as a short hairpin RNA (shRNA) or small interfering RNA (siRNA). The masking construct may also comprise microRNA (miRNA). While present, the masking construct suppresses expression of the gene product. The gene product may be a fluorescent protein or other RNA transcript or proteins that would otherwise be detectable by a labeled probe, aptamer, or antibody but for the presence of the masking construct. Upon activation of the effector protein the masking construct is cleaved or otherwise silenced allowing for expression and detection of the gene product as the positive detectable signal.

[0400] In certain example embodiments, the masking construct may sequester one or more reagents needed to generate a detectable positive signal such that release of the one or more reagents from the masking construct results in generation of the detectable positive signal. The one or more reagents may combine to produce a colorimetric signal, a chemiluminescent signal, a fluorescent signal, or any other detectable signal and may comprise any reagents known to be suitable for such purposes. In certain example embodiments, the one or more reagents are sequestered by RNA aptamers that bind the one or more reagents. The one or more reagents are released when the effector protein is activated upon detection of a target molecule and the RNA or DNA aptamers are degraded.

[0401] In certain example embodiments, the masking construct may be immobilized on a solid substrate in an individual discrete volume (defined further below) and sequesters a single reagent. For example, the reagent may be a bead comprising a dye. When sequestered by the immobilized reagent, the individual beads are too diffuse to generate a detectable signal, but upon release from the masking construct are able to generate a detectable signal, for example by aggregation or simple increase in solution concentration. In certain example embodiments, the immobilized masking agent is a RNA- or DNA-based aptamer that can be cleaved by the activated effector protein upon detection of a target molecule.

[0402] In certain other example embodiments, the masking construct binds to an immobilized reagent in solution thereby blocking the ability of the reagent to bind to a separate labeled binding partner that is free in solution. Thus, upon application of a washing step to a sample, the labeled binding partner can be washed out of the sample in the absence of a target molecule. However, if the effector protein is activated, the masking construct is cleaved to a degree sufficient to interfere with the ability of the masking construct to bind the reagent thereby allowing the labeled binding partner to bind to the immobilized reagent. Thus, the labeled binding partner remains after the wash step indicating the presence of the target molecule in the sample. In certain aspects, the masking construct that binds the immobilized reagent is a DNA or RNA aptamer. The immobilized reagent may be a protein and the labeled minding partner may be a labeled antibody. Alternatively, the immobilized reagent may be streptavidin and the labeled binding partner may be labeled biotin. The label on the binding partner used in the above embodiments may be any detectable label known in the art. In addition, other known binding partners may be used in accordance with the overall design described herein.

[0403] In certain example embodiments, the masking construct may comprise a ribozyme. Ribozymes are RNA molecules having catalytic properties. Ribozymes, both naturally and engineered, comprise or consist of RNA that may be targeted by the effector proteins disclosed herein. The ribozyme may be selected or engineered to catalyze a reaction that either generates a negative detectable signal or prevents generation of a positive control signal. Upon deactivation of the ribozyme by the activated effector protein the reaction generating a negative control signal, or preventing generation of a positive detectable signal, is removed thereby allowing a positive detectable signal to be generated. In one example embodiment, the ribozyme may catalyze a colorimetric reaction causing a solution to appear as a first color. When the ribozyme is deactivated the solution then turns to a second color, the second color being the detectable positive signal. An example of how ribozymes can be used to catalyze a colorimetric reaction are described in Zhao et al. “Signal amplification of glucosamine-6-phosphate based on ribozyme glmS,” Biosens Bioelectron. 2014; 16:337-42, and provide an example of how such a system could be modified to work in the context of the embodiments disclosed herein. Alternatively, ribozymes, when present can generate cleavage products of, for example, RNA transcripts. Thus, detection of a positive detectable signal may comprise detection of non-cleaved RNA transcripts that are only generated in the absence of the ribozyme.

[0404] In certain example embodiments, the one or more reagents is a protein, such as an enzyme, capable of facilitating generation of a detectable signal, such as a colorimetric, chemiluminescent, or fluorescent signal, that is inhibited or sequestered such that the protein cannot generate the detectable signal by the binding of one or more DNA or RNA aptamers to the protein. Upon activation of the effector proteins disclosed herein, the DNA or RNA aptamers are cleaved or degraded to an extent that they no longer inhibit the protein's ability to generate the detectable signal. In certain example embodiments, the aptamer is a thrombin inhibitor aptamer. In certain example embodiments the thrombin inhibitor aptamer has a sequence of GGGAACAAAGCUGAAGUACUUACCC (SEQ ID NO:439). When this aptamer is cleaved, thrombin will become active and will cleave a peptide colorimetric or fluorescent substrate. In certain example embodiments, the colorimetric substrate is para-nitroanilide (pNA) covalently linked to the peptide substrate for thrombin. Upon cleavage by thrombin, pNA is released and becomes yellow in color and easily visible to the eye. In certain example embodiments, the fluorescent substrate is 7-amino-4-methylcoumarin a blue fluorophore that can be detected using a fluorescence detector. Inhibitory aptamers may also be used for horseradish peroxidase (HRP), beta-galactosidase, or calf alkaline phosphatase (CAP) and within the general principals laid out above.

[0405] In certain embodiments, RNase or DNase activity is detected colorimetrically via cleavage of enzyme-inhibiting aptamers. One potential mode of converting DNase or RNase activity into a colorimetric signal is to couple the cleavage of a DNA or RNA aptamer with the re-activation of an enzyme that is capable of producing a colorimetric output. In the absence of RNA or DNA cleavage, the intact aptamer will bind to the enzyme target and inhibit its activity. The advantage of this readout system is that the enzyme provides an additional amplification step: once liberated from an aptamer via collateral activity (e.g. C2c1 collateral activity), the colorimetric enzyme will continue to produce colorimetric product, leading to a multiplication of signal.

[0406] In certain embodiments, an existing aptamer that inhibits an enzyme with a colorimetric readout is used. Several aptamer/enzyme pairs with colorimetric readouts exist, such as thrombin, protein C, neutrophil elastase, and subtilisin. These proteases have colorimetric substrates based upon pNA and are commercially available. In certain embodiments, a novel aptamer targeting a common colorimetric enzyme is used. Common and robust enzymes, such as beta-galactosidase, horseradish peroxidase, or calf intestinal alkaline phosphatase, could be targeted by engineered aptamers designed by selection strategies such as SELEX. Such strategies allow for quick selection of aptamers with nanomolar binding efficiencies and could be used for the development of additional enzyme/aptamer pairs for colorimetric readout.

[0407] In certain embodiments, RNase or DNase activity is detected colorimetrically via cleavage of RNA-tethered inhibitors. Many common colorimetric enzymes have competitive, reversible inhibitors: for example, beta-galactosidase can be inhibited by galactose. Many of these inhibitors are weak, but their effect can be increased by increases in local concentration. By linking local concentration of inhibitors to DNase and/or RNase activity, colorimetric enzyme and inhibitor pairs can be engineered into DNase and RNase sensors. The colorimetric DNase or RNase sensor based upon small-molecule inhibitors involves three components: the colorimetric enzyme, the inhibitor, and a bridging RNA or DNA that is covalently linked to both the inhibitor and enzyme, tethering the inhibitor to the enzyme. In the uncleaved configuration, the enzyme is inhibited by the increased local concentration of the small molecule; when the DNA or RNA is cleaved (e.g. by Cas13 or Cas12 collateral cleavage), the inhibitor will be released and the colorimetric enzyme will be activated.

[0408] In certain embodiments, RNase or DNase activity is detected colorimetrically via formation and/or activation of G-quadruplexes. G quadraplexes in DNA can complex with heme (iron (III)-protoporphyrin IX) to form a DNAzyme with peroxidase activity. When supplied with a peroxidase substrate (e.g. ABTS: (2,2′-Azinobis [3-ethylbenzothiazoline-6-sulfonic acid]-diammonium salt)), the G-quadraplex-heme complex in the presence of hydrogen peroxide causes oxidation of the substrate, which then forms a green color in solution. An example G-quadraplex forming DNA sequence is: GGGTAGGGCGGGTTGGGA (SEQ ID NO:440). By hybridizing an additional DNA or RNA sequence, referred to herein as a “staple,” to this DNA aptamer, formation of the G-quadraplex structure will be limited. Upon collateral activation, the staple will be cleaved allowing the G quadraplex to form and heme to bind. This strategy is particularly appealing because color formation is enzymatic, meaning there is additional amplification beyond collateral activation.

[0409] In certain example embodiments, the masking construct may be immobilized on a solid substrate in an individual discrete volume (defined further below) and sequesters a single reagent. For example, the reagent may be a bead comprising a dye. When sequestered by the immobilized reagent, the individual beads are too diffuse to generate a detectable signal, but upon release from the masking construct are able to generate a detectable signal, for example by aggregation or simple increase in solution concentration. In certain example embodiments, the immobilized masking agent is a DNA- or RNA-based aptamer that can be cleaved by the activated effector protein upon detection of a target molecule.

[0410] In one example embodiment, the masking construct comprises a detection agent that changes color depending on whether the detection agent is aggregated or dispersed in solution. For example, certain nanoparticles, such as colloidal gold, undergo a visible purple to red color shift as they move from aggregates to dispersed particles. Accordingly, in certain example embodiments, such detection agents may be held in aggregate by one or more bridge molecules. At least a portion of the bridge molecule comprises RNA or DNA. Upon activation of the effector proteins disclosed herein, the RNA or DNA portion of the bridge molecule is cleaved allowing the detection agent to disperse and resulting in the corresponding change in color. In certain example embodiments, the detection agent is a colloidal metal. The colloidal metal material may include water-insoluble metal particles or metallic compounds dispersed in a liquid, a hydrosol, or a metal sol. The colloidal metal may be selected from the metals in groups IA, IB, IIB and IIIB of the periodic table, as well as the transition metals, especially those of group VIII. Preferred metals include gold, silver, aluminum, ruthenium, zinc, iron, nickel and calcium. Other suitable metals also include the following in all of their various oxidation states: lithium, sodium, magnesium, potassium, scandium, titanium, vanadium, chromium, manganese, cobalt, copper, gallium, strontium, niobium, molybdenum, palladium, indium, tin, tungsten, rhenium, platinum, and gadolinium. The metals are preferably provided in ionic form, derived from an appropriate metal compound, for example the A13+, Ru3+, Zn2+, Fe3+, Ni2+ and Ca2+ ions.

[0411] When the RNA or DNA bridge is cut by the activated CRISPR effector, the aforementioned color shift is observed. In certain example embodiments the particles are colloidal metals. In certain other example embodiments, the colloidal metal is a colloidal gold. In certain example embodiments, the colloidal nanoparticles are 15 nm gold nanoparticles (AuNPs). Due to the unique surface properties of colloidal gold nanoparticles, maximal absorbance is observed at 520 nm when fully dispersed in solution and appear red in color to the naked eye. Upon aggregation of AuNPs, they exhibit a red-shift in maximal absorbance and appear darker in color, eventually precipitating from solution as a dark purple aggregate. In certain example embodiments the nanoparticles are modified to include DNA linkers extending from the surface of the nanoparticle. Individual particles are linked together by single-stranded RNA (ssRNA) or single-stranded DNA bridges that hybridize on each end to at least a portion of the DNA linkers. Thus, the nanoparticles will form a web of linked particles and aggregate, appearing as a dark precipitate. Upon activation of the CRISPR effectors disclosed herein, the ssRNA or ssDNA bridge will be cleaved, releasing the AU NPS from the linked mesh and producing a visible red color. Example DNA linkers and bridge sequences are listed below. Thiol linkers on the end of the DNA linkers may be used for surface conjugation to the AuNPS. Other forms of conjugation may be used. In certain example embodiments, two populations of AuNPs may be generated, one for each DNA linker. This will help facilitate proper binding of the ssRNA bridge with proper orientation. In certain example embodiments, a first DNA linker is conjugated by the 3′ end while a second DNA linker is conjugated by the 5′ end.

TABLE 5
DNA linkers and bridge sequences

| | |
|---|---|
| C2c2 | TTATAACTATTCCTAAAAAA |
| colorimetric | AAAAA/3ThioMC3-D/ |
| DNA1 | (SEQ ID NO: 441) |
| C2c2 | /5ThioMC6-D/AAAAAAAA |
| colorimetric | AACTCCCCTAATAACAAT |
| DNA2 | (SEQ ID NO: 442) |
| C2c2 | GGGUAGGAAUAGUUAUAAUU |
| colorimetric | UCCCUUUCCCAUUGUU |
| bridge | AUUAGGGAG |
| | (SEQ ID NO: 443) |

[0412] In certain other example embodiments, the masking construct may comprise an RNA or DNA oligonucleotide to which are attached a detectable label and a masking agent of that detectable label. An example of such a detectable label/masking agent pair is a fluorophore and a quencher of the fluorophore. Quenching of the fluorophore can occur as a result of the formation of a non-fluorescent complex between the fluorophore and another fluorophore or non-fluorescent molecule. This mechanism is known as ground-state complex formation, static quenching, or contact quenching. Accordingly, the RNA or DNA oligonucleotide may be designed so that the fluorophore and quencher are in sufficient proximity for contact quenching to occur. Fluorophores and their cognate quenchers are known in the art and can be selected for this purpose by one having ordinary skill in the art. The particular fluorophore/quencher pair is not critical in the context of this invention, only that selection of the fluorophore/quencher pairs ensures masking of the fluorophore. Upon activation of the effector proteins disclosed herein, the RNA or DNA oligonucleotide is cleaved thereby severing the proximity between the fluorophore and quencher needed to maintain the contact quenching effect. Accordingly, detection of the fluorophore may be used to determine the presence of a target molecule in a sample.

[0413] In certain other example embodiments, the masking construct may comprise one or more RNA oligonucleotides to which are attached one or more metal nanoparticles, such as gold nanoparticles. In some embodiments, the masking construct comprises a plurality of metal nanoparticles crosslinked by a plurality of RNA or DNA oligonucleotides forming a closed loop. In one embodiment, the masking construct comprises three gold nanoparticles crosslinked by three RNA or DNA oligonucleotides forming a closed loop. In some embodiments, the cleavage of the RNA or DNA oligonucleotides by the CRISPR effector protein leads to a detectable signal produced by the metal nanoparticles.

[0414] In certain other example embodiments, the masking construct may comprise one or more RNA or DNA oligonucleotides to which are attached one or more quantum dots. In some embodiments, the cleavage of the RNA or DNA oligonucleotides by the CRISPR effector protein leads to a detectable signal produced by the quantum dots.

[0415] In one example embodiment, the masking construct may comprise a quantum dot. The quantum dot may have multiple linker molecules attached to the surface. At least a portion of the linker molecule comprises RNA or DNA. The linker molecule is attached to the quantum dot at one end and to one or more quenchers along the length or at terminal ends of the linker such that the quenchers are maintained in sufficient proximity for quenching of the quantum dot to occur. The linker may be branched. As above, the quantum dot/quencher pair is not critical, only that selection of the quantum dot/quencher pair ensures masking of the fluorophore. Quantum dots and their cognate quenchers are known in the art and can be selected for this purpose by one having ordinary skill in the art. Upon activation of the effector proteins disclosed herein, the RNA or DNA portion of the linker molecule is cleaved thereby eliminating the proximity between the quantum dot and one or more quenchers needed to maintain the quenching effect. In certain example embodiments the quantum dot is streptavidin conjugated. RNA or DNA are attached via biotin linkers and recruit quenching molecules with the sequences /5Biosg/UCUCGUACGUUC/3IAbRQSp/ (SEQ ID NO. 444) or /5Biosg/UCUCGUACGUUCUCUCGUACGUUC/3IAbRQSp/ (SEQ ID NO. 445), where /5Biosg/ is a biotin tag and /31AbRQSp/ is an Iowa black quencher. Upon cleavage, by the activated effectors disclosed herein the quantum dot will fluoresce visibly.

[0416] In a similar fashion, fluorescence energy transfer (FRET) may be used to generate a detectable positive signal. FRET is a non-radiative process by which a photon from an energetically excited fluorophore (i.e. “donor fluorophore”) raises the energy state of an electron in another molecule (i.e. “the acceptor”) to higher vibrational levels of the excited singlet state. The donor fluorophore returns to the ground state without emitting a fluoresce characteristic of that fluorophore. The acceptor can be another fluorophore or non-fluorescent molecule. If the acceptor is a fluorophore, the transferred energy is emitted as fluorescence characteristic of that fluorophore. If the acceptor is a non-fluorescent molecule the absorbed energy is loss as heat. Thus, in the context of the embodiments disclosed herein, the fluorophore/quencher pair is replaced with a donor fluorophore/acceptor pair attached to the oligonucleotide molecule. When intact, the masking construct generates a first signal (negative detectable signal) as detected by the fluorescence or heat emitted from the acceptor. Upon activation of the effector proteins disclosed herein the RNA oligonucleotide is cleaved and FRET is disrupted such that fluorescence of the donor fluorophore is now detected (positive detectable signal).

[0417] In certain example embodiments, the masking construct comprises the use of intercalating dyes which change their absorbance in response to cleavage of long RNAs or DNAs to short nucleotides. Several such dyes exist. For example, pyronine-Y will complex with RNA and form a complex that has an absorbance at 572 nm. Cleavage of the RNA results in loss of absorbance and a color change. Methylene blue may be used in a similar fashion, with changes in absorbance at 688 nm upon RNA cleavage. Accordingly, in certain example embodiments the masking construct comprises a RNA and intercalating dye complex that changes absorbance upon the cleavage of RNA by the effector proteins disclosed herein.

[0418] In certain example embodiments, the masking construct may comprise an initiator for an HCR reaction. See e.g. Dirks and Pierce. PNAS 101, 15275-15728 (2004). HCR reactions utilize the potential energy in two hairpin species. When a single-stranded initiator having a portion of complementary to a corresponding region on one of the hairpins is released into the previously stable mixture, it opens a hairpin of one species. This process, in turn, exposes a single-stranded region that opens a hairpin of the other species. This process, in turn, exposes a single stranded region identical to the original initiator. The resulting chain reaction may lead to the formation of a nicked double helix that grows until the hairpin supply is exhausted. Detection of the resulting products may be done on a gel or colorimetrically. Example colorimetric detection methods include, for example, those disclosed in Lu et al. “Ultra-sensitive colorimetric assay system based on the hybridization chain reaction-triggered enzyme cascade amplification ACS Appl Mater Interfaces, 2017, 9(1):167-175, Wang et al. “An enzyme-free colorimetric assay using hybridization chain reaction amplification and split aptamers” Analyst 2015, 150, 7657-7662, and Song et al. “Non covalent fluorescent labeling of hairpin DNA probe coupled with hybridization chain reaction for sensitive DNA detection.” Applied Spectroscopy, 70(4): 686-694 (2016).

[0419] In certain example embodiments, the masking construct may comprise a HCR initiator sequence and a cleavable structural element, such as a loop or hairpin, that prevents the initiator from initiating the HCR reaction. Upon cleavage of the structure element by an activated CRISPR effector protein, the initiator is then released to trigger the HCR reaction, detection thereof indicating the presence of one or more targets in the sample. In certain example embodiments, the masking construct comprises a hairpin with a RNA loop. When an activated CRISRP effector protein cuts the RNA loop, the initiator can be released to trigger the HCR reaction.

### Amplification of Target Oligonucleotides

[0420] In certain example embodiments, target RNAs and/or DNAs may be amplified prior to activating the CRISPR effector protein. Any suitable RNA or DNA amplification technique may be used. In certain example embodiments, the RNA or DNA amplification is an isothermal amplification. In certain example embodiments, the isothermal amplification may be nucleic-acid sequenced-based amplification (NASBA), recombinase polymerase amplification (RPA), loop-mediated isothermal amplification (LAMP), strand displacement amplification (SDA), helicase-dependent amplification (HDA), or nicking enzyme amplification reaction (NEAR). In certain example embodiments, non-isothermal amplification methods may be used which include, but are not limited to, PCR, multiple displacement amplification (MDA), rolling circle amplification (RCA), ligase chain reaction (LCR), or ramification amplification method (RAM).

[0421] In certain example embodiments, the RNA or DNA amplification is NASBA, which is initiated with reverse transcription of target RNA by a sequence-specific reverse primer to create a RNA/DNA duplex. RNase H is then used to degrade the RNA template, allowing a forward primer containing a promoter, such as the T7 promoter, to bind and initiate elongation of the complementary strand, generating a double-stranded DNA product. The RNA polymerase promoter-mediated transcription of the DNA template then creates copies of the target RNA sequence. Importantly, each of the new target RNAs can be detected by the guide RNAs thus further enhancing the sensitivity of the assay. Binding of the target RNAs by the guide RNAs then leads to activation of the CRISPR effector protein and the methods proceed as outlined above. The NASBA reaction has the additional advantage of being able to proceed under moderate isothermal conditions, for example at approximately 41° C., making it suitable for systems and devices deployed for early and direct detection in the field and far from clinical laboratories.

[0422] In certain other example embodiments, a recombinase polymerase amplification (RPA) reaction may be used to amplify the target nucleic acids. RPA reactions employ recombinases which are capable of pairing sequence-specific primers with homologous sequence in duplex DNA. If target DNA is present, DNA amplification is initiated and no other sample manipulation such as thermal cycling or chemical melting is required. The entire RPA amplification system is stable as a dried formulation and can be transported safely without refrigeration. RPA reactions may also be carried out at isothermal temperatures with an optimum reaction temperature of 37-42° C. The sequence specific primers are designed to amplify a sequence comprising the target nucleic acid sequence to be detected. In certain example embodiments, a RNA polymerase promoter, such as a T7 promoter, is added to one of the primers. This results in an amplified double-stranded DNA product comprising the target sequence and a RNA polymerase promoter. After, or during, the RPA reaction, a RNA polymerase is added that will produce RNA from the double-stranded DNA templates. The amplified target RNA can then in turn be detected by the CRISPR effector system. In this way target DNA can be detected using the embodiments disclosed herein. RPA reactions can also be used to amplify target RNA. The target RNA is first converted to cDNA using a reverse transcriptase, followed by second strand DNA synthesis, at which point the RPA reaction proceeds as outlined above.

[0423] In an embodiment of the invention, the nicking enzyme is a CRISPR protein. Accordingly, the introduction of nicks into dsDNA can be programmable and sequence-specific. FIG. 5 depicts an embodiment of the invention, which starts with two guides designed to target opposite strands of a dsDNA target. According to the invention, the nickase can be C2c1 or C2c1 used in concert with Cpf1, C° C. In other embodiments, the temperature of the isothermal amplification may be chosen by selecting a polymerase (e.g. Bsu, Bst, Phi29, klenow fragment etc.) operable at a different temperature.

[0424] Thus, where nicking isothermal amplification techniques use nicking enzymes with fixed sequence preference (e.g. in nicking enzyme amplification reaction or NEAR), which requires denaturing of the original dsDNA target to allow annealing and extension of primers that add the nicking substrate to the ends of the target, use of a CRISPR nickase wherein the nicking sites can be programed via guide RNAs means that no denaturing step is necessary, enabling the entire reaction to be truly isothermal. This also simplifies the reaction because these primers that add the nicking substrate are different than the primers that are used later in the reaction, meaning that NEAR requires two primer sets (i.e. 4 primers) while C2c1 nicking amplification only requires one primer set (i.e. two primers). This makes nicking C2c1 amplification much simpler and easier to operate without complicated instrumentation to perform the denaturation and then cooling to the isothermal temperature.

[0425] Accordingly, in certain example embodiments the systems disclosed herein may include amplification reagents. Different components or reagents useful for amplification of nucleic acids are described herein. For example, an amplification reagent as described herein may include a buffer, such as a Tris buffer. A Tris buffer may be used at any concentration appropriate for the desired application or use, for example including, but not limited to, a concentration of 1 mM, 2 mM, 3 mM, 4 mM, 5 mM, 6 mM, 7 mM, 8 mM, 9 mM, 10 mM, 11 mM, 12 mM, 13 mM, 14 mM, 15 mM, 25 mM, 50 mM, 75 mM, 1 M, or the like. One of skill in the art will be able to determine an appropriate concentration of a buffer such as Tris for use with the present invention.

[0426] A salt, such as magnesium chloride (MgCl2), potassium chloride (KCl), or sodium chloride (NaCl), may be included in an amplification reaction, such as PCR, in order to improve the amplification of nucleic acid fragments. Although the salt concentration will depend on the particular reaction and application, in some embodiments, nucleic acid fragments of a particular size may produce optimum results at particular salt concentrations. Larger products may require altered salt concentrations, typically lower salt, in order to produce desired results, while amplification of smaller products may produce better results at higher salt concentrations. One of skill in the art will understand that the presence and/or concentration of a salt, along with alteration of salt concentrations, may alter the stringency of a biological or chemical reaction, and therefore any salt may be used that provides the appropriate conditions for a reaction of the present invention and as described herein.

[0427] Other components of a biological or chemical reaction may include a cell lysis component in order to break open or lyse a cell for analysis of the materials therein. A cell lysis component may include, but is not limited to, a detergent, a salt as described above, such as NaCl, KCl, ammonium sulfate [(NH4)2SO4], or others. Detergents that may be appropriate for the invention may include Triton X-100, sodium dodecyl sulfate (SDS), CHAPS (3-[(3-cholamidopropyl)dimethylammonio]-1-propanesulfonate), ethyl trimethyl ammonium bromide, nonyl phenoxypolyethoxylethanol (NP-40). Concentrations of detergents may depend on the particular application, and may be specific to the reaction in some cases. Amplification reactions may include dNTPs and nucleic acid primers used at any concentration appropriate for the invention, such as including, but not limited to, a concentration of 100 nM, 150 nM, 200 nM, 250 nM, 300 nM, 350 nM, 400 nM, 450 nM, 500 nM, 550 nM, 600 nM, 650 nM, 700 nM, 750 nM, 800 nM, 850 nM, 900 nM, 950 nM, 1 mM, 2 mM, 3 mM, 4 mM, 5 mM, 6 mM, 7 mM, 8 mM, 9 mM, 10 mM, 20 mM, 30 mM, 40 mM, 50 mM, 60 mM, 70 mM, 80 mM, 90 mM, 100 mM, 150 mM, 200 mM, 250 mM, 300 mM, 350 mM, 400 mM, 450 mM, 500 mM, or the like. Likewise, a polymerase useful in accordance with the invention may be any specific or general polymerase known in the art and useful or the invention, including Taq polymerase, Q5 polymerase, or the like.

[0428] In some embodiments, amplification reagents as described herein may be appropriate for use in hot-start amplification. Hot start amplification may be beneficial in some embodiments to reduce or eliminate dimerization of adaptor molecules or oligos, or to otherwise prevent unwanted amplification products or artifacts and obtain optimum amplification of the desired product. Many components described herein for use in amplification may also be used in hot-start amplification. In some embodiments, reagents or components appropriate for use with hot-start amplification may be used in place of one or more of the composition components as appropriate. For example, a polymerase or other reagent may be used that exhibits a desired activity at a particular temperature or other reaction condition. In some embodiments, reagents may be used that are designed or optimized for use in hot-start amplification, for example, a polymerase may be activated after transposition or after reaching a particular temperature. Such polymerases may be antibody-based or aptamer-based. Polymerases as described herein are known in the art. Examples of such reagents may include, but are not limited to, hot-start polymerases, hot-start dNTPs, and photo-caged dNTPs. Such reagents are known and available in the art. One of skill in the art will be able to determine the optimum temperatures as appropriate for individual reagents.

[0429] Amplification of nucleic acids may be performed using specific thermal cycle machinery or equipment, and may be performed in single reactions or in bulk, such that any desired number of reactions may be performed simultaneously. In some embodiments, amplification may be performed using microfluidic or robotic devices, or may be performed using manual alteration in temperatures to achieve the desired amplification. In some embodiments, optimization may be performed to obtain the optimum reactions conditions for the particular application or materials. One of skill in the art will understand and be able to optimize reaction conditions to obtain sufficient amplification.

[0430] In certain embodiments, detection of DNA with the methods or systems of the invention requires transcription of the (amplified) DNA into RNA prior to detection.

[0431] It will be evident that detection methods of the invention can involve nucleic acid amplification and detection procedures in various combinations. The nucleic acid to be detected can be any naturally occurring or synthetic nucleic acid, including but not limited to DNA and RNA, which may be amplified by any suitable method to provide an intermediate product that can be detected. Detection of the intermediate product can be by any suitable method including but not limited to binding and activation of a CRISPR protein which produces a detectable signal moiety by direct or collateral activity.

[0432] The systems, devices, and methods disclosed herein may also be adapted for detection of polypeptides (or other molecules) in addition to detection of nucleic acids, via incorporation of a specifically configured polypeptide detection aptamer. The polypeptide detection aptamers are distinct from the masking construct aptamers discussed above. First, the aptamers are designed to specifically bind to one or more target molecules. In one example embodiment, the target molecule is a target polypeptide. In another example embodiment, the target molecule is a target chemical compound, such as a target therapeutic molecule. Methods for designing and selecting aptamers with specificity for a given target, such as SELEX, are known in the art. In addition to specificity to a given target the aptamers are further designed to incorporate a polymerase promoter binding site. In certain example embodiments, the polymerase promoter is a T7 promoter. Prior to binding the aptamer binding to a target, the polymerase site is not accessible or otherwise recognizable to a polymerase. However, the aptamer is configured so that upon binding of a target the structure of the aptamer undergoes a conformational change such that the polymerase promoter is then exposed. An aptamer sequence downstream of the polymerase promoter acts as a template for generation of a trigger oligonucleotide by a RNA or DNA polymerase. Thus, the template portion of the aptamer may further incorporate a barcode or other identifying sequence that identifies a given aptamer and its target. Guide RNAs as described above may then be designed to recognize these specific trigger oligonucleotide sequences. Binding of the guide RNAs to the trigger oligonucleotides activates the CRISPR effector proteins which proceeds to deactivate the masking constructs and generate a positive detectable signal as described previously.

[0433] Accordingly, in certain example embodiments, the methods disclosed herein comprise the additional step of distributing a sample or set of sample into a set of individual discrete volumes, each individual discrete volume comprising peptide detection aptamers, a CRISPR effector protein, one or more guide RNAs, a masking construct, and incubating the sample or set of samples under conditions sufficient to allow binding of the detection aptamers to the one or more target molecules, wherein binding of the aptamer to a corresponding target results in exposure of the polymerase promoter binding site such that synthesis of a trigger oligonucleotide is initiated by the binding of a RNA polymerase to the RNA polymerase promoter binding site.

[0434] In another example embodiment, binding of the aptamer may expose a primer binding site upon binding of the aptamer to a target polypeptide. For example, the aptamer may expose a RPA primer binding site. Thus, the addition or inclusion of the primer will then feed into an amplification reaction, such as the RPA reaction outlined above.

[0435] In certain example embodiments, the aptamer may be a conformation-switching aptamer, which upon binding to the target of interest may change secondary structure and expose new regions of single-stranded DNA. In certain example embodiments, these new-regions of single-stranded DNA may be used as substrates for ligation, extending the aptamers and creating longer ssDNA molecules which can be specifically detected using the embodiments disclosed herein. The aptamer design could be further combined with ternary complexes for detection of low-epitope targets, such as glucose (Yang et al. 2015: pubs.acs.org/doi/abs/10.1021/acs.analchem.5b01634). Example conformation shifting aptamers and corresponding guide RNAs (crRNAs) are shown below.

| | |
|---|---|
| Thrombin | tgtggttggt gtggttggtt |
| aptamer | catggtcata ttggtttttt |
| | tttttttttc |
| | caaccacagtctctgt |
| | (SEQ ID NO: 446) |
| Thrombin | ggttggtagt ctcgaattgc |
| ligation | tctctttcac tggcc |
| probe | (SEQ ID NO: 447) |
| Thrombin | gaaattaata cgactcacta |
| RPA | tagggggttg gttcatggtc |
| forward 1 | atattggt |
| primer | (SEQ ID NO: 448) |
| Thrombin | gaaattaata cgactcacta |
| RPA | tagggggttg gtgtggttgg |
| forward 2 | ttcatggtca |
| primer | tattggt |
| | (SEQ ID NO: 449) |
| Thrombin | ggccagtgaa agagagcaat |
| RPA | tcgagactac c |
| reverse 1 | (SEQ ID NO: 450) |
| primer | |
| Thrombin | gauuuagacu accccaaaaa |
| crRNA 1 | cgaaggggac uaaaacccag |
| | ugaaagagag caauucgaga |
| | cuac (SEQ ID NO: 451) |
| Thrombin | gauuuagacu accccaaaaa |
| crRNA 2 | cgaaggggac uaaaacaaag |
| | agagcaauuc gagacuacca |
| | acca (SEQ ID NO: 452) |
| Thrombin | gauuuagacu accccaaaaa |
| crRNA 3 | cgaaggggac uaaaacagac |
| | uaccaaccac agagacugug |
| | guug (SEQ ID NO: 453) |
| PTK7 full | gttagatcgc aagcatatca |
| length | ttgcgcttgc gatctaactg |
| amplicon | ctgcgccgcc gggaaaatac |
| control | tgtacggtta gatcgcatag |
| | tctcgaattg ctctctttca |
| | ctggcc (SEQ ID NO: 454) |
| PTK7 | gttagatcgc aagcatatca |
| aptamer | ttgcgcttgc gatctaactg |
| | ctgcgccgcc gggaaaatac |
| | tgtacggtta g |
| | (SEQ ID NO: 455) |
| PTK7 | atcgcatagt ctcgaattgc |
| ligation | tctctttcac tggcc |
| probe | (SEQ ID NO: 456) |
| PTK7 RPA | gaaattaata cgactcacta |
| forward 1 | tagggatcgc aagcatatca |
| primer | ttgcgcttgc |
| | (SEQ ID NO: 457) |
| PTK7 RPA | ggccagtgaa agagagcaat |
| reverse 1 | tcgagactat g |
| primer | (SEQ ID NO: 458) |
| PTK7 | gauuuagacu accccaaaaa |
| crRNA 1 | cgaaggggac uaaaacccag |
| | ugaaagagag caauucgaga |
| | cuau (SEQ ID NO: 459) |
| PTK7 | gauuuagacu accccaaaaa |
| crRNA 2 | cgaaggggac uaaaacagag |
| | caauucgaga cuaugcgauc |
| | uaac (SEQ ID NO: 460) |
| PTK7 | gauuuagacu accccaaaaa |
| crRNA 3 | cgaaggggac uaaaacacua |
| | ugcgaucuaa ccguacagua |
| | uuuu (SEQ ID NO: 461) |

### General Comments on Methods of Use of the CRISPR System

[0436] In particular embodiments, the methods described herein may involve targeting one or more polynucleotide targets of interest. The polynucleotide targets of interest may be targets which are relevant to a specific disease or the treatment thereof, relevant for the generation of a given trait of interest or relevant for the production of a molecule of interest. When referring to the targeting of a“polynucleotide target” this may include targeting one or more of a coding regions, an intron, a promoter and any other 5′ or 3′ regulatory regions such as termination regions, ribosome binding sites, enhancers, silencers etc. The gene may encode any protein or RNA of interest. Accordingly, the target may be a coding region which can be transcribed into mRNA, tRNA or rRNA, but also recognition sites for proteins involved in replication, transcription and regulation thereof.

[0437] In particular embodiments, the methods described herein may involve targeting one or more genes of interest, wherein at least one gene of interest encodes along noncoding RNA (IncRNA). While lncRNAs have been found to be critical for cellular functioning. As the lncRNAs that are essential have been found to differ for each cell type (C. P. Fulco et al., 2016, Science, doi: 10.1126/science.aag2445; N. E. Sanjana et al., 2016, Science, doi:10.1126/science.aaf8325), the methods provided herein may involve the step of determining the incRNA that is relevant for cellular function for the cell of interest.

[0438] In an exemplary method for modifying a target polynucleotide by integrating an exogenous polynucleotide template, a double stranded break is introduced into the genome sequence by the CRISPR complex, the break is repaired via homologous recombination an exogenous polynucleotide template such that the template is integrated into the genome. The presence of a double-stranded break facilitates integration of the template.

[0439] In other embodiments, this invention provides a method of modifying expression of a polynucleotide in a eukaryotic cell. The method comprises increasing or decreasing expression of a target polynucleotide by using a CRISPR complex that binds to the polynucleotide.

[0440] In some methods, a target polynucleotide can be inactivated to effect the modification of the expression in a cell. For example, upon the binding of a CRISPR complex to a target sequence in a cell, the target polynucleotide is inactivated such that the sequence is not transcribed, the coded protein is not produced, or the sequence does not function as the wild-type sequence does. For example, a protein or microRNA coding sequence may be inactivated such that the protein is not produced.

[0441] In some methods, a control sequence can be inactivated such that it no longer functions as a control sequence. As used herein, “control sequence” refers to any nucleic acid sequence that effects the transcription, translation, or accessibility of a nucleic acid sequence. Examples of a control sequence include, a promoter, a transcription terminator, and an enhancer are control sequences. The inactivated target sequence may include a deletion mutation (i.e., deletion of one or more nucleotides), an insertion mutation (i.e., insertion of one or more nucleotides), or a nonsense mutation (i.e., substitution of a single nucleotide for another nucleotide such that a stop codon is introduced). In some methods, the inactivation of a target sequence results in “knockout” of the target sequence.

[0442] Also provided herein are methods of functional genomics which involve identifying cellular interactions by introducing multiple combinatorial perturbations and correlating observed genomic, genetic, proteomic, epigenetic and/or phenotypic effects with the perturbation detected in single cells, also referred to as “perturb-seq”. In one embodiment, these methods combine single-cell RNA sequencing (RNA-seq) and clustered regularly interspaced short palindromic repeats (CRISPR)-based perturbations (Dixit et al. 2016, Cell 167, 1853-1866; Adamson et al. 2016, Cell 167, 1867-1882). Generally, these methods involve introducing a number of combinatorial perturbations to a plurality of cells in a population of cells, wherein each cell in the plurality of the cells receives at least 1 perturbation, detecting genomic, genetic, proteomic, epigenetic and/or phenotypic differences in single cells compared to one or more cells that did not receive any perturbation, and detecting the perturbation(s) in single cells; and determining measured differences relevant to the perturbations by applying a model accounting for co-variates to the measured differences, whereby intercellular and/or intracellular networks or circuits are inferred. More particularly, the single cell sequencing comprises cell barcodes, whereby the cell-of-origin of each RNA is recorded. More particularly, the single cell sequencing comprises unique molecular identifiers (UMI), whereby the capture rate of the measured signals, such as transcript copy number or probe binding events, in a single cell is determined.

[0443] These methods can be used for combinatorial probing of cellular circuits, for dissecting cellular circuitry, for delineating molecular pathways, and/or for identifying relevant targets for therapeutics development. More particularly, these methods may be used to identify groups of cells based on their molecular profiling. Similarities in gene-expression profiles between organic (e.g. disease) and induced (e.g. by small molecule) states may identify clinically-effective therapies.

[0444] Accordingly, in particular embodiments, therapeutic methods provided herein comprise, determining, for a population of cells isolated from a subject, optimal therapeutic target and/or therapeutic, using perturb-seq as described above.

[0445] In particular embodiments, pertub-seq methods as referred to herein elsewhere are used to determine, in an isolated cell or cell line, cellular circuits which may affect production of a molecule of interest.

### Additional CRISPR-Cas Development and Use Considerations

[0446] The present invention may be further illustrated and extended based on aspects of CRISPR-Cas9 development and use as set forth in the following articles and particularly as relates to delivery of a CRISPR protein complex and uses of an RNA guided endonuclease in cells and organisms:
[0447] Multiplex genome engineering using CRISPR/Cas systems. Cong, L., Ran, F. A., Cox, D., Lin, S., Barretto, R., Habib, N., Hsu, P. D., Wu, X., Jiang, W., Marraffini, L. A., & Zhang, F. Science February 15; 339(6121):819-23 (2013);
[0448] RNA-guided editing of bacterial genomes using CRISPR-Cas systems. Jiang W., Bikard D., Cox D., Zhang F, Marraffini L A. Nat Biotechnol March; 31(3):233-9 (2013);
[0449] One-Step Generation of Mice Carrying Mutations in Multiple Genes by CRISPR/Cas-Mediated Genome Engineering. Wang H., Yang H., Shivalila C S., Dawlaty M M. Cheng A W., Zhang F., Jaenisch R. Cell May 9; 153(4):910-8 (2013);
[0450] Optical control of mammalian endogenous transcription and epigenetic states. Konermann S, Brigham M D, Trevino A E, Hsu P D, Heidenreich M, Cong L, Platt R J, Scott D A, Church G M, Zhang F. Nature. August 22; 500(7463):472-6. doi: 10.1038/Nature12466. Epub 2013 Aug. 23 (2013);
[0451] Double Nicking by RNA-Guided CRISPR Cas9 for Enhanced Genome Editing Specificity. Ran, F A., Hsu, P D., Lin, C Y., Gootenberg, J S., Konermann, S., Trevino, A E., Scott, D A., Inoue, A., Matoba, S., Zhang, Y., & Zhang, F. Cell August 28. pii: S0092-8674(13)01015-5 (2013-A);
[0452] DNA targeting specificity of RNA-guided Cas9 nucleases. Hsu, P., Scott, D., Weinstein, J., Ran, F A., Konermann, S., Agarwala, V., Li, Y., Fine, E., Wu, X., Shalem, O., Cradick, T J., Marraffini, L A., Bao, G., & Zhang, F. Nat Biotechnol doi:10.1038/nbt.2647(2013);
[0453] Genome engineering using the CRISPR-Cas9 system. Ran, F A., Hsu, P D., Wright, J., Agarwala, V., Scott, D A., Zhang, F. Nature Protocols November; 8(11):2281-308 (2013-B);
[0454] Genome-Scale CRISPR-Cas9 Knockout Screening in Human Cells. Shalem, O., Sanjana, N E., Hartenian, E., Shi, X., Scott, D A., Mikkelson, T., Heckl, D., Ebert, B L., Root, D E., Doench, J G., Zhang, F. Science December 12. (2013). [Epub ahead of print];
[0455] Crystal structure of cas9 in complex with guide RNA and target DNA. Nishimasu, H., Ran, F A., Hsu, P D., Konermann, S., Shehata, S I., Dohmae, N., Ishitani, R., Zhang, F., Nureki, O. Cell February 27, 156(5):935-49 (2014);
[0456] Genome-wide binding of the CRISPR endonuclease Cas9 in mammalian cells. Wu X., Scott D A., Kriz A J., Chiu A C., Hsu P D., Dadon D B., Cheng A W., Trevino A E., Konermann S., Chen S., Jaenisch R., Zhang F., Sharp P A. Nat Biotechnol. April 20. doi: 10.1038/nbt.2889 (2014);
[0457] CRISPR-Cas9 Knockin Mice for Genome Editing and Cancer Modeling. Platt R J, Chen S, Zhou Y, Yim M J, Swiech L, Kempton H R, Dahlman J E, Parnas O, Eisenhaure™, Jovanovic M, Graham D B, Jhunjhunwala S, Heidenreich M, Xavier R J, Langer R, Anderson D G, Hacohen N, Regev A, Feng G, Sharp P A, Zhang F. Cell 159(2): 440-455 DOI: 10.1016/j.cell.2014.09.014(2014);
[0458] Development and Applications of CRISPR-Cas9 for Genome Engineering, Hsu P D, Lander E S, Zhang F., Cell. June 5; 157(6):1262-78 (2014).
[0459] Genetic screens in human cells using the CRISPR/Cas9 system, Wang T, Wei J J, Sabatini D M, Lander E S., Science. January 3; 343(6166): 80-84. doi:10.1126/science.1246981(2014);
[0460] Rational design of highly active sgRNAs for CRISPR-Cas9-mediated gene inactivation, Doench J G, Hartenian E, Graham D B, Tothova Z, Hegde M, Smith I, Sullender M, Ebert B L, Xavier R J, Root D E., (published online 3 Sep. 2014) Nat Biotechnol. December; 32(12):1262-7 (2014);
[0461] In vivo interrogation of gene function in the mammalian brain using CRISPR-Cas9, Swiech L, Heidenreich M, Banerjee A, Habib N, Li Y, Trombetta J, Sur M, Zhang F., (published online 19 Oct. 2014) Nat Biotechnol. January; 33(1):102-6 (2015);
[0462] Genome-scale transcriptional activation by an engineered CRISPR-Cas9 complex, Konermann S, Brigham M D, Trevino A E, Joung J, Abudayyeh O O, Barcena C, Hsu P D, Habib N, Gootenberg J S, Nishimasu H, Nureki O, Zhang F., Nature. January 29; 517(7536):583-8 (2015).
[0463] A split-Cas9 architecture for inducible genome editing and transcription modulation, Zetsche B, Volz S E, Zhang F., (published online 2 Feb. 2015) Nat Biotechnol. February; 33(2):139-42 (2015);
[0464] Genome-wide CRISPR Screen in a Mouse Model of Tumor Growth and Metastasis, Chen S, Sanjana N E, Zheng K, Shalem O, Lee K, Shi X, Scott D A, Song J, Pan J Q, Weissleder R, Lee H, Zhang F, Sharp P A. Cell 160, 1246-1260, Mar. 12, 2015 (multiplex screen in mouse), and
[0465] In vivo genome editing using Staphylococcus aureus Cas9, Ran F A, Cong L, Yan W X, Scott D A, Gootenberg J S, Kriz A J, Zetsche B, Shalem O, Wu X, Makarova K S, Koonin E V, Sharp P A, Zhang F., (published online 1 Apr. 2015), Nature. April 9; 520(7546):186-91 (2015).
[0466] Shalem et al., “High-throughput functional genomics using CRISPR-Cas9,” Nature Reviews Genetics 16, 299-311 (May 2015).
[0467] Xu et al., “Sequence determinants of improved CRISPR sgRNA design,” Genome Research 25, 1147-1157 (August 2015).
[0468] Parnas et al., “A Genome-wide CRISPR Screen in Primary Immune Cells to Dissect Regulatory Networks,” Cell 162, 675-686 (Jul. 30, 2015).
[0469] Ramanan et al., CRISPR/Cas9 cleavage of viral DNA efficiently suppresses hepatitis B virus,” Scientific Reports 5:10833. doi: 10.1038/srep10833 (Jun. 2, 2015)
[0470] Nishimasu et al., Crystal Structure of Staphylococcus aureus Cas9,” Cell 162, 1113-1126 (Aug. 27, 2015)
[0471] BCL11A enhancer dissection by Cas9-mediated in situ saturating mutagenesis, Canver et al., Nature 527(7577):192-7 (Nov. 12, 2015) doi: 10.1038/nature15521. Epub 2015 Sep. 16.
[0472] Cpf1 Is a Single RNA-Guided Endonuclease of a Class 2 CRISPR-Cas System, Zetsche et al., Cell 163, 759-71 (Sep. 25, 2015).
[0473] Discovery and Functional Characterization of Diverse Class 2 CRISPR-Cas Systems, Shmakov et al., Molecular Cell, 60(3), 385-397 doi: 10.1016/j.molcel.2015.10.008 Epub Oct. 22, 2015.
[0474] Rationally engineered Cas9 nucleases with improved specificity, Slaymaker et al., Science 2016 Jan. 1 351(6268): 84-88 doi: 10.1126/science.aad5227. Epub 2015 Dec. 1. [Epub ahead of print].
[0475] Gao et al, “Engineered Cpf1 Enzymes with Altered PAM Specificities,” bioRxiv 091611; doi: dx.doi.org/10.1101/091611 (Dec. 4, 2016)
   each of which is incorporated herein by reference, may be considered in the practice of the instant invention, and discussed briefly below:
[0476] Cong et al. engineered type II CRISPR-Cas systems for use in eukaryotic cells based on both Streptococcus thermophilus Cas9 and also Streptococcus pyogenes Cas9 and demonstrated that Cas9 nucleases can be directed by short RNAs to induce precise cleavage of DNA in human and mouse cells. Their study further showed that Cas9 as converted into a nicking enzyme can be used to facilitate homology-directed repair in eukaryotic cells with minimal mutagenic activity. Additionally, their study demonstrated that multiple guide sequences can be encoded into a single CRISPR array to enable simultaneous editing of several at endogenous genomic loci sites within the mammalian genome, demonstrating easy programmability and wide applicability of the RNA-guided nuclease technology. This ability to use RNA to program sequence specific DNA cleavage in cells defined a new class of genome engineering tools. These studies further showed that other CRISPR loci are likely to be transplantable into mammalian cells and can also mediate mammalian genome cleavage. Importantly, it can be envisaged that several aspects of the CRISPR-Cas system can be further improved to increase its efficiency and versatility.
[0477] Jiang et al. used the clustered, regularly interspaced, short palindromic repeats (CRISPR)-associated Cas9 endonuclease complexed with dual-RNAs to introduce precise mutations in the genomes of Streptococcus pneumoniae and Escherichia coli. The approach relied on dual-RNA:Cas9-directed cleavage at the targeted genomic site to kill unmutated cells and circumvents the need for selectable markers or counter-selection systems. The study reported reprogramming dual-RNA:Cas9 specificity by changing the sequence of short CRISPR RNA (crRNA) to make single- and multinucleotide changes carried on editing templates. The study showed that simultaneous use of two crRNAs enabled multiplex mutagenesis. Furthermore, when the approach was used in combination with recombineering, in S. pneumoniae, nearly 100% of cells that were recovered using the described approach contained the desired mutation, and in E. coli, 65% that were recovered contained the mutation.
[0478] Wang et al. (2013) used the CRISPR-Cas system for the one-step generation of mice carrying mutations in multiple genes which were traditionally generated in multiple steps by sequential recombination in embryonic stem cells and/or time-consuming intercrossing of mice with a single mutation. The CRISPR-Cas system will greatly accelerate the in vivo study of functionally redundant genes and of epistatic gene interactions.
[0479] Konermann et al. (2013) addressed the need in the art for versatile and robust technologies that enable optical and chemical modulation of DNA-binding domains based CRISPR Cas9 enzyme and also Transcriptional Activator Like Effectors
[0480] Ran et al. (2013-A) described an approach that combined a Cas9 nickase mutant with paired guide RNAs to introduce targeted double-strand breaks. This addresses the issue of the Cas9 nuclease from the microbial CRISPR-Cas system being targeted to specific genomic loci by a guide sequence, which can tolerate certain mismatches to the DNA target and thereby promote undesired off-target mutagenesis. Because individual nicks in the genome are repaired with high fidelity, simultaneous nicking via appropriately offset guide RNAs is required for double-stranded breaks and extends the number of specifically recognized bases for target cleavage. The authors demonstrated that using paired nicking can reduce off-target activity by 50- to 1,500-fold in cell lines and to facilitate gene knockout in mouse zygotes without sacrificing on-target cleavage efficiency. This versatile strategy enables a wide variety of genome editing applications that require high specificity.
[0481] Hsu et al. (2013) characterized SpCas9 targeting specificity in human cells to inform the selection of target sites and avoid off-target effects. The study evaluated >700 guide RNA variants and SpCas9-induced indel mutation levels at >100 predicted genomic off-target loci in 293T and 293FT cells. The authors that SpCas9 tolerates mismatches between guide RNA and target DNA at different positions in a sequence-dependent manner, sensitive to the number, position and distribution of mismatches. The authors further showed that SpCas9-mediated cleavage is unaffected by DNA methylation and that the dosage of SpCas9 and gRNA can be titrated to minimize off-target modification. Additionally, to facilitate mammalian genome engineering applications, the authors reported providing a web-based software tool to guide the selection and validation of target sequences as well as off-target analyses.
[0482] Ran et al. (2013-B) described a set of tools for Cas9-mediated genome editing via non-homologous end joining (NHEJ) or homology-directed repair (HDR) in mammalian cells, as well as generation of modified cell lines for downstream functional studies. To minimize off-target cleavage, the authors further described a double-nicking strategy using the Cas9 nickase mutant with paired guide RNAs. The protocol provided by the authors experimentally derived guidelines for the selection of target sites, evaluation of cleavage efficiency and analysis of off-target activity. The studies showed that beginning with target design, gene modifications can be achieved within as little as 1-2 weeks, and modified clonal cell lines can be derived within 2-3 weeks.
[0483] Shalem et al. described a new way to interrogate gene function on a genome-wide scale. Their studies showed that delivery of a genome-scale CRISPR-Cas9 knockout (GeCKO) library targeted 18,080 genes with 64,751 unique guide sequences enabled both negative and positive selection screening in human cells. First, the authors showed use of the GeCKO library to identify genes essential for cell viability in cancer and pluripotent stem cells. Next, in a melanoma model, the authors screened for genes whose loss is involved in resistance to vemurafenib, a therapeutic that inhibits mutant protein kinase BRAF. Their studies showed that the highest-ranking candidates included previously validated genes NF1 and MED12 as well as novel hits NF2, CUL3, TADA2B, and TADA1. The authors observed a high level of consistency between independent guide RNAs targeting the same gene and a high rate of hit confirmation, and thus demonstrated the promise of genome-scale screening with Cas9.
[0484] Nishimasu et al. reported the crystal structure of Streptococcus pyogenes Cas9 in complex with sgRNA and its target DNA at 2.5 A° resolution. The structure revealed a bilobed architecture composed of target recognition and nuclease lobes, accommodating the sgRNA:DNA heteroduplex in a positively charged groove at their interface. Whereas the recognition lobe is essential for binding sgRNA and DNA, the nuclease lobe contains the HNH and RuvC nuclease domains, which are properly positioned for cleavage of the complementary and non-complementary strands of the target DNA, respectively. The nuclease lobe also contains a carboxyl-terminal domain responsible for the interaction with the protospacer adjacent motif (PAM). This high-resolution structure and accompanying functional analyses have revealed the molecular mechanism of RNA-guided DNA targeting by Cas9, thus paving the way for the rational design of new, versatile genome-editing technologies.
[0485] Wu et al. mapped genome-wide binding sites of a catalytically inactive Cas9 (dCas9) from Streptococcus pyogenes loaded with single guide RNAs (sgRNAs) in mouse embryonic stem cells (mESCs). The authors showed that each of the four sgRNAs tested targets dCas9 to between tens and thousands of genomic sites, frequently characterized by a 5-nucleotide seed region in the sgRNA and an NGG protospacer adjacent motif (PAM). Chromatin inaccessibility decreases dCas9 binding to other sites with matching seed sequences; thus 70% of off-target sites are associated with genes. The authors showed that targeted sequencing of 295 dCas9 binding sites in mESCs transfected with catalytically active Cas9 identified only one site mutated above background levels. The authors proposed a two-state model for Cas9 binding and cleavage, in which a seed match triggers binding but extensive pairing with target DNA is required for cleavage.
[0486] Platt et al. established a Cre-dependent Cas9 knockin mouse. The authors demonstrated in vivo as well as ex vivo genome editing using adeno-associated virus (AAV)-, lentivirus-, or particle-mediated delivery of guide RNA in neurons, immune cells, and endothelial cells.
[0487] Hsu et al. (2014) is a review article that discusses generally CRISPR-Cas9 history from yogurt to genome editing, including genetic screening of cells.
[0488] Wang et al. (2014) relates to a pooled, loss-of-function genetic screening approach suitable for both positive and negative selection that uses a genome-scale lentiviral single guide RNA (sgRNA) library.
[0489] Doench et al. created a pool of sgRNAs, tiling across all possible target sites of a panel of six endogenous mouse and three endogenous human genes and quantitatively assessed their ability to produce null alleles of their target gene by antibody staining and flow cytometry. The authors showed that optimization of the PAM improved activity and also provided an on-line tool for designing sgRNAs.
[0490] Swiech et al. demonstrate that AAV-mediated SpCas9 genome editing can enable reverse genetic studies of gene function in the brain.
[0491] Konermann et al. (2015) discusses the ability to attach multiple effector domains, e.g., transcriptional activator, functional and epigenomic regulators at appropriate positions on the guide such as stem or tetraloop with and without linkers.
[0492] Zetsche et al. demonstrates that the Cas9 enzyme can be split into two and hence the assembly of Cas9 for activation can be controlled.
[0493] Chen et al. relates to multiplex screening by demonstrating that a genome-wide in vivo CRISPR-Cas9 screen in mice reveals genes regulating lung metastasis.
[0494] Ran et al. (2015) relates to SaCas9 and its ability to edit genomes and demonstrates that one cannot extrapolate from biochemical assays.
[0495] Shalem et al. (2015) described ways in which catalytically inactive Cas9 (dCas9) fusions are used to synthetically repress (CRISPRi) or activate (CRISPRa) expression, showing. advances using Cas9 for genome-scale screens, including arrayed and pooled screens, knockout approaches that inactivate genomic loci and strategies that modulate transcriptional activity.
[0496] Xu et al. (2015) assessed the DNA sequence features that contribute to single guide RNA (sgRNA) efficiency in CRISPR-based screens. The authors explored efficiency of CRISPR/Cas9 knockout and nucleotide preference at the cleavage site. The authors also found that the sequence preference for CRISPRi/a is substantially different from that for CRISPR/Cas9 knockout.
[0497] Parnas et al. (2015) introduced genome-wide pooled CRISPR-Cas9 libraries into dendritic cells (DCs) to identify genes that control the induction of tumor necrosis factor (Tnf) by bacterial lipopolysaccharide (LPS). Known regulators of Tlr4 signaling and previously unknown candidates were identified and classified into three functional modules with distinct effects on the canonical responses to LPS.
[0498] Ramanan et al (2015) demonstrated cleavage of viral episomal DNA (cccDNA) in infected cells. The HBV genome exists in the nuclei of infected hepatocytes as a 3.2 kb double-stranded episomal DNA species called covalently closed circular DNA (cccDNA), which is a key component in the HBV life cycle whose replication is not inhibited by current therapies. The authors showed that sgRNAs specifically targeting highly conserved regions of HBV robustly suppresses viral replication and depleted cccDNA.
[0499] Nishimasu et al. (2015) reported the crystal structures of SaCas9 in complex with a single guide RNA (sgRNA) and its double-stranded DNA targets, containing the 5′-TTGAAT-3′ PAM and the 5′-TTGGGT-3′ PAM. A structural comparison of SaCas9 with SpCas9 highlighted both structural conservation and divergence, explaining their distinct PAM specificities and orthologous sgRNA recognition.
[0500] Canver et al. (2015) demonstrated a CRISPR-Cas9-based functional investigation of non-coding genomic elements. The authors we developed pooled CRISPR-Cas9 guide RNA libraries to perform in situ saturating mutagenesis of the human and mouse BCL11A enhancers which revealed critical features of the enhancers.
[0501] Zetsche et al. (2015) reported characterization of Cpf1, a class 2 CRISPR nuclease from Francisella novicida U112 having features distinct from Cas9. Cpf1 is a single RNA-guided endonuclease lacking tracrRNA, utilizes a T-rich protospacer-adjacent motif, and cleaves DNA via a staggered DNA double-stranded break.
[0502] Shmakov et al. (2015) reported three distinct Class 2 CRISPR-Cas systems. Two system CRISPR enzymes (C2c1 and C2c3) contain RuvC-like endonuclease domains distantly related to Cpf1. Unlike Cpf1, C2c1 depends on both crRNA and tracrRNA for DNA cleavage. The third enzyme (C2c2) contains two predicted HEPN RNase domains and is tracrRNA independent.
[0503] Slaymaker et al (2016) reported the use of structure-guided protein engineering to improve the specificity of Streptococcus pyogenes Cas9 (SpCas9). The authors developed “enhanced specificity” SpCas9 (eSpCas9) variants which maintained robust on-target cleavage with reduced off-target effects.

[0504] The methods and tools provided herein are exemplified for C2c1, a type II nuclease that does not make use of tracrRNA. Orthologs of C2c1 have been identified in different bacterial species as described herein. Further type II nucleases with similar properties can be identified using methods described in the art (Shmakov et al. 2015, 60:385-397; Abudayeh et al. 2016, Science, 5; 353(6299)). In particular embodiments, such methods for identifying novel CRISPR effector proteins may comprise the steps of selecting sequences from the database encoding a seed which identifies the presence of a CRISPR Cas locus, identifying loci located within 10 kb of the seed comprising Open Reading Frames (ORFs) in the selected sequences, selecting therefrom loci comprising ORFs of which only a single ORF encodes a novel CRISPR effector having greater than 700 amino acids and no more than 90% homology to a known CRISPR effector. In particular embodiments, the seed is a protein that is common to the CRISPR-Cas system, such as Cas1. In further embodiments, the CRISPR array is used as a seed to identify new effector proteins.

[0505] Preassembled recombinant CRISPR-C2c1 complexes comprising C2c1 and crRNA may be transfected, for example by electroporation, resulting in high mutation rates and absence of detectable off-target mutations. Hur, J. K. et al, Targeted mutagenesis in mice by electroporation of Cpf1 ribonucleoproteins, Nat Biotechnol. 2016 Jun. 6. doi: 10.1038/nbt.3596. [Epub ahead of print]. An efficient multiplexed system employing Cpf1 has been demonstrated in Drosophila employing gRNAs processed from an array containing inventing tRNAs. Port, F. et al, Expansion of the CRISPR toolbox in an animal with tRNA-flanked Cas9 and Cpf1 gRNAs. doi: dx.doi.org/10.1101/046417. Cpf1 and C2c1 are both Type V CRISPR Cas proteins that share structure similarity. Like C2c1, Cpf1 creates staggered double strand breaks at the distal end of PAM (in contrast to Cas9, which creates blunt cut at the proximal end of PAM). Accordingly, similar multiplexed system employing C2c1 is envisaged.

[0506] Also, “Dimeric CRISPR RNA-guided FokI nucleases for highly specific genome editing”, Shengdar Q. Tsai, Nicolas Wyvekens, Cyd Khayter, Jennifer A. Foden, Vishal Thapar, Deepak Reyon, Mathew J. Goodwin, Martin J. Aryee, J. Keith Joung Nature Biotechnology 32(6): 569-77 (2014), relates to dimeric RNA-guided FokI Nucleases that recognize extended sequences and can edit endogenous genes with high efficiencies in human cells.

[0507] With respect to general information on CRISPR-Cas Systems, components thereof, and delivery of such components, including methods, materials, delivery vehicles, vectors, particles, AAV, and making and using thereof, including as to amounts and formulations, all useful in the practice of the instant invention, reference is made to: U.S. Pat. Nos. 8,697,359, 8,771,945, 8,795,965, 8,865,406, 8,871,445, 8,889,356, 8,889,418, 8,895,308, 8,906,616, 8,932,814, 8,945,839, 8,993,233 and 8,999,641; US Patent Publications US 2014-0310830 (U.S. application Ser. No. 14/105,031), US 2014-0287938 A1 (U.S. application Ser. No. 14/213,991), US 2014-0273234 A1 (U.S. application Ser. No. 14/293,674), US2014-0273232 A1 (U.S. application Ser. No. 14/290,575), US 2014-0273231 (U.S. application Ser. No. 14/259,420), US 2014-0256046 A1 (U.S. application Ser. No. 14/226,274), US 2014-0248702 A1 (U.S. application Ser. No. 14/258,458), US 2014-0242700 A1 (U.S. application Ser. No. 14/222,930), US 2014-0242699 A1 (U.S. application Ser. No. 14/183,512), US 2014-0242664 A1 (U.S. application Ser. No. 14/104,990), US 2014-0234972 A1 (U.S. application Ser. No. 14/183,471), US 2014-0227787 A1 (U.S. application Ser. No. 14/256,912), US 2014-0189896 A1 (U.S. application Ser. No. 14/105,035), US 2014-0186958 (U.S. application Ser. No. 14/105,017), US 2014-0186919 A1 (U.S. application Ser. No. 14/104,977), US 2014-0186843 A1 (U.S. application Ser. No. 14/104,900), US 2014-0179770 A1 (U.S. application Ser. No. 14/104,837) and US 2014-0179006 A1 (U.S. application Ser. No. 14/183,486), US 2014-0170753 (U.S. application Ser. No. 14/183,429); US 2015-0184139 (U.S. application Ser. No. 14/324,960); Ser. No. 14/054,414 European Patent Applications EP 2 771 468 (EP13818570.7), EP 2 764 103 (EP13824232.6), and EP 2 784 162 (EP14170383.5); and PCT Patent Publications WO 2014/093661 (PCT/US2013/074743), WO 2014/093694 (PCT/US2013/074790), WO 2014/093595 (PCT/US2013/074611), WO 2014/093718 (PCT/US2013/074825), WO 2014/093709 (PCT/US2013/074812), WO 2014/093622 (PCT/US2013/074667), WO 2014/093635 (PCT/US2013/074691), WO 2014/093655 (PCT/US2013/074736), WO 2014/093712 (PCT/US2013/074819), WO 2014/093701 (PCT/US2013/074800), WO 2014/018423 (PCT/US2013/051418), WO 2014/204723 (PCT/US2014/041790), WO 2014/204724 (PCT/US2014/041800), WO 2014/204725 (PCT/US2014/041803), WO 2014/204726 (PCT/US2014/041804), WO 2014/204727 (PCT/US2014/041806), WO 2014/204728 (PCT/US2014/041808), WO 2014/204729 (PCT/US2014/041809), WO 2015/089351 (PCT/US2014/069897), WO 2015/089354 (PCT/US2014/069902), WO 2015/089364 (PCT/US2014/069925), WO 2015/089427 (PCT/US2014/070068), WO 2015/089462 (PCT/US2014/070127), WO 2015/089419 (PCT/US2014/070057), WO 2015/089465 (PCT/US2014/070135), WO 2015/089486(PCT/US2014/070175), PCT/US2015/051691, PCT/US2015/051830. Reference is also made to U.S. provisional patent applications 61/758,468; 61/802,174; 61/806,375; 61/814,263; 61/819,803 and 61/828,130, filed on Jan. 30, 2013; Mar. 15, 2013; Mar. 28, 2013; Apr. 20, 2013; May 6, 2013 and May 28, 2013 respectively. Reference is also made to U.S. provisional patent application 61/836,123, filed on Jun. 17, 2013. Reference is additionally made to U.S. provisional patent applications 61/835,931, 61/835,936, 61/835,973, 61/836,080, 61/836,101, and 61/836,127, each filed Jun. 17, 2013. Further reference is made to U.S. provisional patent applications 61/862,468 and 61/862,355 filed on Aug. 5, 2013; 61/871,301 filed on Aug. 28, 2013; 61/960,777 filed on Sep. 25, 2013 and 61/961,980 filed on Oct. 28, 2013. Reference is yet further made to: PCT/US2014/62558 filed Oct. 28, 2014, and U.S. Provisional Patent Applications Ser. Nos. 61/915,148, 61/915,150, 61/915,153, 61/915,203, 61/915,251, 61/915,301, 61/915,267, 61/915,260, and 61/915,397, each filed Dec. 12, 2013; 61/757,972 and 61/768,959, filed on Jan. 29, 2013 and Feb. 25, 2013; 62/010,888 and 62/010,879, both filed Jun. 11, 2014; 62/010,329, 62/010,439 and 62/010,441, each filed Jun. 10, 2014; 61/939,228 and 61/939,242, each filed Feb. 12, 2014; 61/980,012, filed Apr. 15, 2014; 62/038,358, filed Aug. 17, 2014; 62/055,484, 62/055,460 and 62/055,487, each filed Sep. 25, 2014; and 62/069,243, filed Oct. 27, 2014. Reference is made to PCT application designating, inter alia, the United States, application No. PCT/US14/41806, filed Jun. 10, 2014. Reference is made to U.S. provisional patent application 61/930,214 filed on Jan. 22, 2014. Reference is made to PCT application designating, inter alia, the United States, application No. PCT/US14/41806, filed Jun. 10, 2014.

[0508] Mention is also made of U.S. application 62/180,709, 17 Jun. 2015, PROTECTED GUIDE RNAS (PGRNAS); U.S. application 62/091,455, filed, 12 Dec. 2014, PROTECTED GUIDE RNAS (PGRNAS); U.S. application 62/096,708, 24 Dec. 2014, PROTECTED GUIDE RNAS (PGRNAS); U.S. applications 62/091,462, 12 Dec. 2014, 62/096,324, 23 Dec. 2014, 62/180,681, 17 Jun. 2015, and 62/237,496, 5 Oct. 2015, DEAD GUIDES FOR CRISPR TRANSCRIPTION FACTORS; U.S. application 62/091,456, 12 Dec. 2014 and 62/180,692, 17 Jun. 2015, ESCORTED AND FUNCTIONALIZED GUIDES FOR CRISPR-CAS SYSTEMS; U.S. application 62/091,461, 12 Dec. 2014, DELIVERY, USE AND THERAPEUTIC APPLICATIONS OF THE CRISPR-CAS SYSTEMS AND COMPOSITIONS FOR GENOME EDITING AS TO HEMATOPOETIC STEM CELLS (HSCs); U.S. application 62/094,903,19 Dec. 2014, UNBIASED IDENTIFICATION OF DOUBLE-STRAND BREAKS AND GENOMIC REARRANGEMENT BY GENOME-WISE INSERT CAPTURE SEQUENCING; U.S. application 62/096,761, 24 Dec. 2014, ENGINEERING OF SYSTEMS, METHODS AND OPTIMIZED ENZYME AND GUIDE SCAFFOLDS FOR SEQUENCE MANIPULATION; U.S. application 62/098,059, 30 Dec. 2014, 62/181,641, 18 Jun. 2015, and 62/181,667,18 Jun. 2015, RNA-TARGETING SYSTEM; U.S. application 62/096,656, 24 Dec. 2014 and 62/181,151, 17 Jun. 2015, CRISPR HAVING OR ASSOCIATED WITH DESTABILIZATION DOMAINS; U.S. application 62/096,697,24 Dec. 2014, CRISPR HAVING OR ASSOCIATED WITH AAV; U.S. application 62/098,158, 30 Dec. 2014, ENGINEERED CRISPR COMPLEX INSERTIONAL TARGETING SYSTEMS; U.S. application 62/151,052, 22 Apr. 2015, CELLULAR TARGETING FOR EXTRACELLULAR EXOSOMAL REPORTING; U.S. application 62/054,490, 24 Sep. 2014, DELIVERY, USE AND THERAPEUTIC APPLICATIONS OF THE CRISPR-CAS SYSTEMS AND COMPOSITIONS FOR TARGETING DISORDERS AND DISEASES USING PARTICLE DELIVERY COMPONENTS; U.S. application 61/939,154, 12 Feb. 2014, SYSTEMS, METHODS AND COMPOSITIONS FOR SEQUENCE MANIPULATION WITH OPTIMIZED FUNCTIONAL CRISPR-CAS SYSTEMS; U.S. application 62/055,484, 25 Sep. 2014, SYSTEMS, METHODS AND COMPOSITIONS FOR SEQUENCE MANIPULATION WITH OPTIMIZED FUNCTIONAL CRISPR-CAS SYSTEMS; U.S. application 62/087,537, 4 Dec. 2014, SYSTEMS, METHODS AND COMPOSITIONS FOR SEQUENCE MANIPULATION WITH OPTIMIZED FUNCTIONAL CRISPR-CAS SYSTEMS; U.S. application 62/054,651, 24 Sep. 2014, DELIVERY, USE AND THERAPEUTIC APPLICATIONS OF THE CRISPR-CAS SYSTEMS AND COMPOSITIONS FOR MODELING COMPETITION OF MULTIPLE CANCER MUTATIONS IN VIVO; U.S. application 62/067,886, 23 Oct. 2014, DELIVERY, USE AND THERAPEUTIC APPLICATIONS OF THE CRISPR-CAS SYSTEMS AND COMPOSITIONS FOR MODELING COMPETITION OF MULTIPLE CANCER MUTATIONS IN VIVO; U.S. applications 62/054,675, 24 Sep. 2014 and 62/181,002, 17 Jun. 2015, DELIVERY, USE AND THERAPEUTIC APPLICATIONS OF THE CRISPR-CAS SYSTEMS AND COMPOSITIONS IN NEURONAL CELLS/TISSUES; U.S. application 62/054,528, 24 Sep. 2014, DELIVERY, USE AND THERAPEUTIC APPLICATIONS OF THE CRISPR-CAS SYSTEMS AND COMPOSITIONS IN IMMUNE DISEASES OR DISORDERS; U.S. application 62/055,454, 25 Sep. 2014, DELIVERY, USE AND THERAPEUTIC APPLICATIONS OF THE CRISPR-CAS SYSTEMS AND COMPOSITIONS FOR TARGETING DISORDERS AND DISEASES USING CELL PENETRATION PEPTIDES (CPP); U.S. application 62/055,460, 25 Sep. 2014, MULTIFUNCTIONAL-CRISPR COMPLEXES AND/OR OPTIMIZED ENZYME LINKED FUNCTIONAL-CRISPR COMPLEXES; U.S. application 62/087,475, 4 Dec. 2014 and 62/181,690, 18 Jun. 2015, FUNCTIONAL SCREENING WITH OPTIMIZED FUNCTIONAL CRISPR-CAS SYSTEMS; U.S. application 62/055,487, 25 Sep. 2014, FUNCTIONAL SCREENING WITH OPTIMIZED FUNCTIONAL CRISPR-CAS SYSTEMS; U.S. application 62/087,546, 4 Dec. 2014 and 62/181,687,18 Jun. 2015, MULTIFUNCTIONAL CRISPR COMPLEXES AND/OR OPTIMIZED ENZYME LINKED FUNCTIONAL-CRISPR COMPLEXES; and U.S. application 62/098,285, 30 Dec. 2014, CRISPR MEDIATED IN VIVO MODELING AND GENETIC SCREENING OF TUMOR GROWTH AND METASTASIS.

[0509] Mention is made of U.S. applications 62/181,659, 18 Jun. 2015 and 62/207,318, 19 Aug. 2015, ENGINEERING AND OPTIMIZATION OF SYSTEMS, METHODS, ENZYME AND GUIDE SCAFFOLDS OF CAS9 ORTHOLOGS AND VARIANTS FOR SEQUENCE MANIPULATION. Mention is made of U.S. applications 62/181,663, 18 Jun. 2015 and 62/245,264, 22 Oct. 2015, NOVEL CRISPR ENZYMES AND SYSTEMS, U.S. applications 62/181,675, 18 Jun. 2015, 62/285,349, 22 Oct. 2015, 62/296,522, 17 Feb. 2016, and 62/320,231, 8 Apr. 2016, NOVEL CRISPR ENZYMES AND SYSTEMS, U.S. application 62/232,067, 24 Sep. 2015, U.S. application Ser. No. 14/975,085, 18 Dec. 2015, European application No. 16150428.7, U.S. application 62/205,733, 16 Aug. 2015, U.S. application 62/201,542, 5 Aug. 2015, U.S. application 62/193,507, 16 Jul. 2015, and U.S. application 62/181,739, 18 Jun. 2015, each entitled NOVEL CRISPR ENZYMES AND SYSTEMS and of U.S. application 62/245,270, 22 Oct. 2015, NOVEL CRISPR ENZYMES AND SYSTEMS. Mention is also made of U.S. application 61/939,256, 12 Feb. 2014, and WO 2015/089473 (PCT/US2014/070152), 12 Dec. 2014, each entitled ENGINEERING OF SYSTEMS, METHODS AND OPTIMIZED GUIDE COMPOSITIONS WITH NEW ARCHITECTURES FOR SEQUENCE MANIPULATION. Mention is also made of PCT/US2015/045504, 15 Aug. 2015, U.S. application 62/180,699, 17 Jun. 2015, and U.S. application 62/038,358, 17 Aug. 2014, each entitled GENOME EDITING USING CAS9 NICKASES.

[0510] In addition, mention is made of PCT application PCT/US14/70057, Attorney Reference 47627.99.2060 and BI-2013/107 entitled “DELIVERY, USE AND THERAPEUTIC APPLICATIONS OF THE CRISPR-CAS SYSTEMS AND COMPOSITIONS FOR TARGETING DISORDERS AND DISEASES USING PARTICLE DELIVERY COMPONENTS (claiming priority from one or more or all of US provisional patent applications: 62/054,490, filed Sep. 24, 2014; 62/010,441, filed Jun. 10, 2014; and 61/915,118, 61/915,215 and 61/915,148, each filed on Dec. 12, 2013) (“the Particle Delivery PCT”), incorporated herein by reference, and of PCT application PCT/US14/70127, Attorney Reference 47627.99.2091 and BI-2013/101 entitled “DELIVERY, USE AND THERAPEUTIC APPLICATIONS OF THE CRISPR-CAS SYSTEMS AND COMPOSITIONS FOR GENOME EDITING “(claiming priority from one or more or all of US provisional patent applications: 61/915,176; 61/915,192; 61/915,215; 61/915,107, 61/915,145; 61/915,148; and 61/915,153 each filed Dec. 12, 2013) (“the Eye PCT”), incorporated herein by reference, with respect to a method of preparing an sgRNA-and-Cpf1 protein containing particle comprising admixing a mixture comprising an sgRNA and Cpf1 protein (and optionally HDR template) with a mixture comprising or consisting essentially of or consisting of surfactant, phospholipid, biodegradable polymer, lipoprotein and alcohol; and particles from such a process. For example, wherein Cpf1 protein and sgRNA were mixed together at a suitable, e.g., 3:1 to 1:3 or 2:1 to 1:2 or 1:1 molar ratio, at a suitable temperature, e.g., 15-30C, e.g., 20-25C, e.g., room temperature, for a suitable time, e.g., 15-45, such as 30 minutes, advantageously in sterile, nuclease free buffer, e.g., 1×PBS. Separately, particle components such as or comprising: a surfactant, e.g., cationic lipid, e.g., 1,2-dioleoyl-3-trimethylammonium-propane (DOTAP); phospholipid, e.g., dimyristoylphosphatidylcholine (DMPC); biodegradable polymer, such as an ethylene-glycol polymer or PEG, and a lipoprotein, such as a low-density lipoprotein, e.g., cholesterol were dissolved in an alcohol, advantageously a C1-6 alkyl alcohol, such as methanol, ethanol, isopropanol, e.g., 100% ethanol. The two solutions were mixed together to form particles containing the Cas9-sgRNA complexes. Accordingly, sgRNA may be pre-complexed with the Cpf1 protein, before formulating the entire complex in a particle. Formulations may be made with a different molar ratio of different components known to promote delivery of nucleic acids into cells (e.g. 1,2-dioleoyl-3-trimethylammonium-propane (DOTAP), 1,2-ditetradecanoyl-sn-glycero-3-phosphocholine (DMPC), polyethylene glycol (PEG), and cholesterol) For example DOTAP:DMPC:PEG:Cholesterol Molar Ratios may be DOTAP 100, DMPC 0, PEG 0, Cholesterol 0; or DOTAP 90, DMPC 0, PEG 10, Cholesterol 0; or DOTAP 90, DMPC 0, PEG 5, Cholesterol 5. DOTAP 100, DMPC 0, PEG 0, Cholesterol 0. That application accordingly comprehends admixing sgRNA, Cpf1 protein and components that form a particle; as well as particles from such admixing. Aspects of the instant invention can involve particles; for example, particles using a process analogous to that of the Particle Delivery PCT or that of the Eye PCT, e.g., by admixing a mixture comprising sgRNA and/or Cpf1 as in the instant invention and components that form a particle, e.g., as in the Particle Delivery PCT or in the Eye PCT, to form a particle and particles from such admixing (or, of course, other particles involving sgRNA and/or Cpf1 as in the instant invention). Cpf1 and C2c1 are both Type V CRISPR-Cas proteins that share structure similarity. Unlike Cas9, which generates blunt cuts at the proximal end of PAM, Cpf1 and C2c1 generate staggered cuts at the distal end of PAM. Accordingly, similar systems with C2c1 may be envisaged.

[0511] The subject invention may be used as part of a research program wherein there is transmission of results or data. A computer system (or digital device) may be used to receive, transmit, display and/or store results, analyze the data and/or results, and/or produce a report of the results and/or data and/or analysis. A computer system may be understood as a logical apparatus that can read instructions from media (e.g. software) and/or network port (e.g. from the internet), which can optionally be connected to a server having fixed media. A computer system may comprise one or more of a CPU, disk drives, input devices such as keyboard and/or mouse, and a display (e.g. a monitor). Data communication, such as transmission of instructions or reports, can be achieved through a communication medium to a server at a local or a remote location. The communication medium can include any means of transmitting and/or receiving data. For example, the communication medium can be a network connection, a wireless connection, or an internet connection. Such a connection can provide for communication over the World Wide Web. It is envisioned that data relating to the present invention can be transmitted over such networks or connections (or any other suitable means for transmitting information, including but not limited to mailing a physical report, such as a print-out) for reception and/or for review by a receiver. The receiver can be but is not limited to an individual, or electronic system (e.g. one or more computers, and/or one or more servers). In some embodiments, the computer system comprises one or more processors. Processors may be associated with one or more controllers, calculation units, and/or other units of a computer system, or implanted in firmware as desired. If implemented in software, the routines may be stored in any computer readable memory such as in RAM, ROM, flash memory, a magnetic disk, a laser disk, or other suitable storage medium. Likewise, this software may be delivered to a computing device via any known delivery method including, for example, over a communication channel such as a telephone line, the internet, a wireless connection, etc., or via a transportable medium, such as a computer readable disk, flash drive, etc. The various steps may be implemented as various blocks, operations, tools, modules and techniques which, in turn, may be implemented in hardware, firmware, software, or any combination of hardware, firmware, and/or software. When implemented in hardware, some or all of the blocks, operations, techniques, etc. may be implemented in, for example, a custom integrated circuit (IC), an application specific integrated circuit (ASIC), a field programmable logic array (FPGA), a programmable logic array (PLA), etc. A client-server, relational database architecture can be used in embodiments of the invention. A client-server architecture is a network architecture in which each computer or process on the network is either a client or a server. Server computers are typically powerful computers dedicated to managing disk drives (file servers), printers (print servers), or network traffic (network servers). Client computers include PCs (personal computers) or workstations on which users run applications, as well as example output devices as disclosed herein. Client computers rely on server computers for resources, such as files, devices, and even processing power. In some embodiments of the invention, the server computer handles all of the database functionality. The client computer can have software that handles all the front-end data management and can also receive data input from users. A machine readable medium comprising computer-executable code may take many forms, including but not limited to, a tangible storage medium, a carrier wave medium or physical transmission medium. Non-volatile storage media include, for example, optical or magnetic disks, such as any of the storage devices in any computer(s) or the like, such as may be used to implement the databases, etc. shown in the drawings. Volatile storage media include dynamic memory, such as main memory of such a computer platform. Tangible transmission media include coaxial cables; copper wire and fiber optics, including the wires that comprise a bus within a computer system. Carrier-wave transmission media may take the form of electric or electromagnetic signals, or acoustic or light waves such as those generated during radio frequency (RF) and infrared (IR) data communications. Common forms of computer-readable media therefore include for example: a floppy disk, a flexible disk, hard disk, magnetic tape, any other magnetic medium, a CD-ROM, DVD or DVD-ROM, any other optical medium, punch cards paper tape, any other physical storage medium with patterns of holes, a RAM, a ROM, a PROM and EPROM, a FLASH-EPROM, any other memory chip or cartridge, a carrier wave transporting data or instructions, cables or links transporting such a carrier wave, or any other medium from which a computer may read programming code and/or data. Many of these forms of computer readable media may be involved in carrying one or more sequences of one or more instructions to a processor for execution. Accordingly, the invention comprehends performing any method herein-discussed and storing and/or transmitting data and/or results therefrom and/or analysis thereof, as well as products from performing any method herein-discussed, including intermediates.

### CAS12B (C2C1)

[0512] The invention provides C2c1 (Type V-B; Cas12b) effector proteins and orthologues. The terms “orthologue” (also referred to as “ortholog” herein) and “homologue” (also referred to as “homolog” herein) are well known in the art. By means of further guidance, a “homologue” of a protein as used herein is a protein of the same species which performs the same or a similar function as the protein it is a homologue of. Homologous proteins may but need not be structurally related, or are only partially structurally related. An “orthologue” of a protein as used herein is a protein of a different species which performs the same or a similar function as the protein it is an orthologue of. Orthologous proteins may but need not be structurally related, or are only partially structurally related. Homologs and orthologs may be identified by homology modelling (see, e.g., Greer, Science vol. 228 (1985) 1055, and Blundell et al. Eur J Biochem vol 172 (1988), 513) or “structural BLAST” (Dey F, Cliff Zhang Q, Petrey D, Honig B. Toward a “structural BLAST”: using structural relationships to infer function. Protein Sci. 2013 April; 22(4):359-66. doi: 10.1002/pro.2225.). See also Shmakov et al. (2015) for application in the field of CRISPR-Cas loci. Homologous proteins may but need not be structurally related, or are only partially structurally related.

[0513] The C2c1 gene is found in several diverse bacterial genomes, typically in the same locus with cas1, cas2, and cas4 genes and a CRISPR cassette. Thus, the layout of this putative novel CRISPR-Cas system appears to be similar to that of type II-B. Furthermore, similar to Cas9, the C2c1 protein contains an active RuvC-like nuclease, an arginine-rich region, and a Zn finger (absent in Cas9).

[0514] The present invention encompasses the use of a C2c1 (Cas12b) effector protein, derived from a C2c1 locus denoted as subtype V-B. Herein such effector proteins are also referred to as “C2c1p”, e.g., a C2c1 protein (and such effector protein or C2c1 protein or protein derived from a C2c1 locus is also called “CRISPR enzyme”). Presently, the subtype V-B loci encompasses cas1-Cas4 fusion, cas2, a distinct gene denoted C2c1 and a CRISPR array. C2c1 (CRISPR-associated protein C2c1) is a large protein (about 1100-1300 amino acids) that contains a RuvC-like nuclease domain homologous to the corresponding domain of Cas9 along with a counterpart to the characteristic arginine-rich cluster of Cas9. However, C2c1 lacks the HNH nuclease domain that is present in all Cas9 proteins, and the RuvC-like domain is contiguous in the C2c1 sequence, in contrast to Cas9 where it contains long inserts including the HNH domain. Accordingly, in particular embodiments, the CRISPR-Cas enzyme comprises only a RuvC-like nuclease domain.

[0515] C2c1 (also known as Cas12b) proteins are RNA guided nucleases. Its cleavage relies on a tracr RNA to recruit a guide RNA comprising a guide sequence and a direct repeat, where the guide sequence hybridizes with the target nucleotide sequence to form a DNA/RNA heteroduplex. Based on current studies, C2c1 nuclease activity also requires relies on recognition of PAM sequence. C2c1 PAM sequences may be T-rich sequences. In some embodiments, the PAM sequence is 5′ TTN 3′ or 5′ ATTN 3′, wherein N is any nucleotide. In a particular embodiment, the PAM sequence is 5′ TTC 3′. In a particular embodiment, the PAM is in the sequence of Plasmodium falciparum.

[0516] C2c1 creates a staggered cut at the target locus, with a 5′ overhang, or a “sticky end” at the PAM distal side of the target sequence. In some embodiments, the 5′ overhang is 7 nt. See Lewis and Ke, Mol Cell. 2017 Feb. 2; 65(3):377-379.

[0517] The invention also provides a CRISPR-C2c1 system encompassing the use of a C2c1 effector protein. In some embodiments, the system comprises: I. a CRISPR-Cas system RNA polynucleotide sequence, wherein the polynucleotide sequence comprises: a crRNA comprising (a) a direct repeat polynucleotide and (b) a guide sequence polynucleotide capable of hybridizing to a target sequence; II. a tracr RNA polynucleotide; and III. a polynucleotide sequence encoding the C2c1, optionally comprising at least one or more nuclear localization sequences, wherein the direct repeat sequence hybridizes to the guide sequence and directs sequence-specific binding of a CRISPR complex to the target sequence, and wherein the CRISPR complex comprises the CRISPR protein complexed with (1) the guide sequence that is hybridized or hybridizable to the target sequence, and (2) the direct repeat sequence, and the polynucleotide sequence encoding a CRISPR protein is DNA or RNA. The tracr may be fused to the crRNA. For example, the tracr RNA may be fused to the crRNA at the 5′ end of the direct repeat. As used herein, the term crRNA refers to CRISPR RNA, and may be used herein interchangeably with the term gRNA or guide RNA. When the tracr is fused to the crRNA of gRNA, such may be referred to as single guide RNA or synthetic guide RNA (sgRNA).

[0518] C2c1 creates double strand breaks at the distal end of PAM, in contrast to cleavage at the proximal end of PAM created by Cas9 (Jinek et al., 2012; Cong et al., 2013). It is proposed that Cpf1 mutated target sequences may be susceptible to repeated cleavage by a single gRNA, hence promoting Cpf1's application in HDR mediated genome editing (Front Plant Sci. 2016 Nov. 14; 7:1683). Cpf1 and C2c1 are both Type V CRISPR Cas proteins that share structure similarity. Like C2c1, Cpf1 creates staggered double strand breaks at the distal end of PAM (in contrast to Cas9, which creates blunt cut at the proximal end of PAM), but unlike Cpf1, C2c1 systems employ a tracrRNA. Accordingly, in certain embodiments, the locus of interest is modified by the CRISPR-C2c1 complex via homology directed repair (HR or HDR). In certain embodiments, the locus of interest is modified by the CRISPR-C2c1 complex independent of HR. In certain embodiments, the locus of interest is modified by the CRISPR-C2c1 complex via non-homologous end joining (NHEJ).

[0519] C2c1 generates a staggered cut with a 5′ overhang, in contrast to the blunt ends generated by Cas9 (Garneau et al., Nature. 2010; 468:67-71; Gasiunas et al., Proc Natl Acad Sci USA. 2012; 109:E2579-2586). This structure of the cleavage product could be particularly advantageous for facilitating non-homologous end joining (NHEJ)-based gene insertion into the mammalian genome (Maresca et al., Genome research. 2013; 23:539-546).

[0520] In particular embodiments, the effector protein is a C2c1 effector protein from or originates from an organism from a genus comprising Alicyclobacillus, Desulfovibrio, Desulfonatronum, Opitutaceae, Tuberibacillus, Bacillus, Brevibacillus, Candidatus, Desulfatirhabdium, Citrobacter, Elusimicrobia, Methylobacterium, Omnitrophica, Phycisphaerae, Planctomycetes, Spirochaetes, Verrucomicrobiaceae, Lentisphaeria, Laceyella.

[0521] In further particular embodiments, the C2c1 effector protein is from or originates from a species selected from Alicyclobacillus acidoterrestris (e.g., ATCC 49025), Alicyclobacillus contaminans (e.g., DSM 17975), Alicyclobacillus macrosporangiidus (e.g. DSM 17980), Bacillus hisashii strain C4, Candidatus Lindowbacteria bacterium RIFCSPLOWO2, Desulfovibrio inopinatus (e.g., DSM 10711), Desulfonatronum thiodismutans (e.g., strain MLF-1 or genbank accession number WP_031386437), Elusimicrobia bacterium RIFOXYA12, Omnitrophica WOR_2 bacterium RIFCSPHIGHO2, Opitutaceae bacterium TAV5 or genbank accession number WP_009513281, Phycisphaerae bacterium ST-NAGAB-D1, Planctomycetes bacterium RBG_13_46_10, Spirochaetes bacterium GWB1_27_13, Verrucomicrobiaceae bacterium UBA2429, Tuberibacillus calidus (e.g., DSM 17572), Bacillus thermoamylovorans (e.g., strain B4166), Brevibacillus sp. CF112, Bacillus sp. NSP2.1, Desulfatirhabdium butyrativorans (e.g., DSM 18734 or genbank accession number WP_028326052), Alicyclobacillus herbarius (e.g., DSM 13609), Citrobacter freundii (e.g., ATCC 8090), Brevibacillus agri (e.g., BAB-2500), Methylobacterium nodulans (e.g., ORS 2060 or genbank accession number WP_043747912), Alicyclobacillus kakegawensis (e.g. genbank accession number WP_067936067), Bacillus sp. V3-13 (e.g. genbank accession number WP_101661451), Lentisphaeria bacterium (e.g. from DCFZ01000012), Laceyella_sediminis (e.g. genbank accession number WP_106341859).

[0522] In certain embodiments, the C2c1 effector protein is from or originates from a species selected from the genus Alicyclobacillus, Bacillus, Desulfatirhabdium, Desulfonatronum, Lentisphaeria, Laceyella, Methylobacterium, or Opitutaceae.

[0523] In certain embodiments, the C2c1 effector protein is from or originates from a species selected from Alicyclobacillus kakegawensis, Bacillus sp._V3-13, Desulfatirhabdium butyrativorans, Desulfonatronum thiodismutans, Lentisphaeria bacterium, Laceyella sediminis, Methylobacterium nodulans, or Opitutaceae bacterium.

[0524] In certain embodiments, the C2c1 effector protein is from or originates from a species selected from Alicyclobacillus kakegawensis wherein the wild type sequence corresponds to the sequence of WP_067936067, Bacillus sp.V3-13 wherein the wild type sequence corresponds to the sequence of WP_101661451, Desulfatirhabdium butyrativorans wherein the wild type sequence corresponds to the sequence of WP_028326052, Desulfonatronum thiodismutans wherein the wild type sequence corresponds to the sequence of WP_031386437, Lentisphaeria bacterium wherein the wild type sequence corresponds to the sequence of DCFZ01000012, Laceyella sediminis wherein the wild type sequence corresponds to the sequence of WP_106341859, Methylobacterium nodulans wherein the wild type sequence corresponds to the sequence of WP_043747912, or Opitutaceae bacterium wherein the wild type sequence corresponds to the sequence of WP_009513281.

[0525] In certain embodiments, the C2c1 effector protein is from or originates from a species selected from Table 1 and has a wild type sequence as indicated in Table 1. It will be understood that mutated or truncated Cas12b proteins as described herein elsewhere may deviate from the sequence indicated.

TABLE 1
Cas12b orthologues

| Species | Sequence |
|---|---|
| Alicyclobacillus | MAVKSIKVKLRLSECPDILAGMWQLHRATNAG |
| kakegawensis | VRYYTEWVSLMRQEILYSRGPDGGQQCYMTAE |
| (SEQ ID | DCQRELLRRLRNRQLHNGRQDQPGTDADLLAI |
| NO: 379) | SRRLYEILVLQSIGKRGDAQQIASSFLSPLVD |
| | PNSKGGRGEAKSGRKPAWQKMRDQGDPRWVAA |
| | REKYEQRKAVDPSKEILNSLDALGLRPLFAVF |
| | TETYRSGVDWKPLGKSQGVRTWDRDMFQQALE |
| | RLMSWESWNRRVGEEYARLFQQKMKFEQEHFA |
| | EQSHLVKLARALEADMRAASQGFEAKRGTAHQ |
| | ITRRALRGADRVFEIWKSIPEEALFSQYDEVI |
| | RQVQAEKRRDFGSHDLFAKLAEPKYQPLWRAD |
| | ETFLTRYALYNGVLRDLEKARQFATFTLPDAC |
| | VNPIWTRFESSQGSNLHKYEFLFDHLGPGRHA |
| | VRFQRLLVVESEGAKERDSVVVPVAPSGQLDK |
| | LVLREEEKSSVALHLHDTARPDGFMAEWAGAK |
| | LQYERSTLARKARRDKQGMRSWRRQPSMLMSA |
| | AQMLEDAKQAGDVYLNISVRVKSPSEVRGQRR |
| | PPYAALFRIDDKQRRVTVNYNKLSAYLEEHPD |
| | KQIPGAPGLLSGLRVMSVDLGLRTSASISVFR |
| | VAKKEEVEALGDGRPPHYYPIHGTDDLVAVHE |
| | RSHLIQMPGETETKQLRKLREERQAVLRPLFA |
| | QLALLRLLVRCGAADERIRTRSWQRLTKQGRE |
| | FTKRLTPSWREALELELTRLEAYCGRVPDDEW |
| | SRIVDRTVIALWRRMGKQVRDWRKQVKSGAKV |
| | KVKGYQLDVVGGNSLAQIDYLEQQYKFLRRWS |
| | FFARASGLVVRADRESHFAVALRQHIENAKRD |
| | RLKKLADRILMEALGYVYEASGPREGQWTAQH |
| | PPCQLIILEELSAYRFSDDRPPSENSKLMAWG |
| | HRGILEELVNQAQVHDVLVGTVYAAFSSRFDA |
| | RTGAPGVRCRRVPARFVGATVDDSLPLWLTEF |
| | LDKHRLDKNLLRPDDVIPTGEGEFLVSPCGEE |
| | AARVRQVHADINAAQNLQRRLWQNFDITELRL |
| | RCDVKMGGEGTVLVPRVNNARAKQLFGKKVLV |
| | SQDGVTFFERSQTGGKPHSEKQTDLTDKELEL |
| | IAEADEARAKSVVLFRDPSGHIGKGHWIRQRE |
| | FWSLVKQRIESHTAERIRVRGVGSSLD |
| Bacillus sp._V3- | MAIRSIKLKMKTNSGTDSIYLRKALWRTHQLI |
| 13 (SEQ ID | NEGIAYYMNLLTLYRQEAIGDKTKEAYQAELI |
| NO: 380) | NIIRNQQRNNGSSEEHGSDQEILALLRQLYEL |
| | IIPSSIGESGDANQLGNKFLYPLVDPNSQSGK |
| | GTSNAGRKPRWKRLKEEGNPDWELEKKKDEER |
| | KAKDPTVKIFDNLNKYGLLPLFPLFTNIQKDI |
| | EWLPLGKRQSVRKWDKDMFIQAIERLLSWESW |
| | NRRVADEYKQLKEKTESYYKEHLTGGEEWIEK |
| | IRKFEKERNMELEKNAFAPNDGYFITSRQIRG |
| | WDRVYEKWSKLPESASPEELWKVVAEQQNKMS |
| | EGFGDPKVFSFLANRENRDIWRGHSERIYHIA |
| | AYNGLQKKLSRTKEQATFTLPDAIEHPLWIRY |
| | ESPGGTNLNLFKLEEKQKKNYYVTLSKIIWPS |
| | EEKWIEKENIEIPLAPSIQFNRQIKLKQHVKG |
| | KQEISFSDYSSRISLDGVLGGSRIQFNRKYIK |
| | NHKELLGEGDIGPVFFNLVVDVAPLQETRNGR |
| | LQSPIGKALKVISSDFSKVIDYKPKELMDWMN |
| | TGSASNSFGVASLLEGMRVMSIDMGQRTSASV |
| | SIFEVVKELPKDQEQKLFYSINDTELFAIHKR |
| | SFLLNLPGEVVTKNNKQQRQERRKKRQFVRSQ |
| | IRMLANVLRLETKKTPDERKKAIHKLMEIVQS |
| | YDSWTASQKEVWEKELNLLTNMAAFNDEIWKE |
| | SLVELHHRIEPYVGQIVSKWRKGLSEGRKNLA |
| | GISMWNIDELEDTRRLLISWSKRSRTPGEANR |
| | IETDEPFGSSLLQHIQNVKDDRLKQMANLIIM |
| | TALGFKYDKEEKDRYKRWKETYPACQIILFEN |
| | LNRYLFNLDRSRRENSRLMKWAHRSIPRTVSM |
| | QGEMFGLQVGDVRSEYSSRFHAKTGAPGIRCH |
| | ALTEEDLKAGSNTLKRLIEDGFINESELAYLK |
| | KGDIIPSQGGELFVTLSKRYKKDSDNNELTVI |
| | HADINAAQNLQKRFWQQNSEVYRVPC |
| | QLARMGEDKLYIPKSQTETIKKYFGKGSFVK |
| | NNTEQEVYKWEKSEKMKIKTDTTFDLQDLDG |
| | FEDISKTIELAQEQQKKYLTMFRDPSGYFFN |
| | NETWRPQKEYWSIVNNIIKSCLKKKILSNKV |
| | EL |
| Desulfatirhabdium | MPLSNNPPVTQRAYTLRLRGADPSDLSWREA |
| butyrativorans | LWHTHEAVNKGAKVFGDWLLTLRGGLDHTLA |
| (SEQ ID | DTKVKGGKGKPDRDPTPEERKARRILLALSW |
| NO: 381) | LSVESKLGAPSSYIVASGDEPAKDRNDNVVS |
| | ALEEILQSRKVAKSEIDDWKRDCSASLSAAI |
| | RDDAVWVNRSKVFDEAVKSVGSSLTREEAWD |
| | MLERFFGSRDAYLTPMKDPEDKSSETEQEDK |
| | AKDLVQKAGQWLSSRYGTSEGADFCRMSDIY |
| | GKIAAWADNASQGGSSTVDDLVSELRQHFDT |
| | KESKATNGLDWIIGLSSYTGHTPNPVHELLR |
| | QNTSLNKSHLDDLKKKANTRAESCKSKIGSK |
| | GQRPYSDAILNDVESVCGFTYRVDKDGQPVS |
| | VADYSKYDVDYKWGTARHYIFAVMLDHAARR |
| | ISLAHKWIKRAEAERHKFEEDAKRIANVPAR |
| | AREWLDSFCKERSVTSGAVEPYRIRRRAVDG |
| | WKEVVAAWSKSDCKSTEDRIAAARALQDDSE |
| | IDKFGDIQLFEALAEDDALCVWHKDGEATNE |
| | PDFQPLIDYSLAIEAEFKKRQFKVPAYRHPD |
| | ELLHPVFCDFGKSRWKINYDVHKNVQAPFYR |
| | GLCLTLWTGSEIKPVPLCWQSKRLTRDLALG |
| | NNHRNDAASAVTRADRLGRAASNVTKSDMVN |
| | ITGLFEQADWNGRLQAPRQQLEAIAWRDNPR |
| | LSEQERNLRMCGMIEHIRWLVTFSVKLQPQG |
| | PWCAYAEQHGLNTNPQYWPHADTNRDRKVHA |
| | RLILPRLPGLRVLSVDLGHRYAAACAVWEAV |
| | NTETVKEACQNVGRDMPKEHDLYLHIKVKKQ |
| | GIGKQTEVDKTTIYRRIGADTLPDGRPHPAP |
| | WARLDRQFLIKLQGEEKDAREASNEEIWALH |
| | QMECKLDRTKPLIDRLIASGWGLLKRQMARL |
| | DALKELGWIPAPDSSENLSREDGEAKDYRES |
| | LAVDDLMFSAVRTLRLALQRHGNRARIAYYL |
| | ISEVKIRPGGIQEKLDENGRIDLLQDALALW |
| | HELFSSPGWRDEAAKQLWDSRIATLAGYKAP |
| | EENGDNVSDVAYRKKQQVYREQLRNVAKTLS |
| | GDVITCKELSDAWKERWEDEDQRWKKLLRWF |
| | KDWVLPSGTQANNATIRNVGGLSLSRLATIT |
| | EFRRKVQVGFFTRLRPDGTRHEIGEQFGQKT |
| | LDALELLREQRVKQLASRIAEAALGIGSEGG |
| | KGWDGGKRPRQRINDSRFAPCHAVVIENLAN |
| | YRPDETRTRLENRRLMTWSASKVHKYLSEAC |
| | QLNGLYLCTVSAWYTSRQDSRTGAPGIRCQD |
| | VSVREFMQSPFWRKQVKQAEAKHDENKGDAR |
| | ERFLCELNKTWKAKTPAEWKKAGFVRIPLRG |
| | GEIFVSADSKSPSAKGIHADLNAAANIGLRA |
| | LTDPDWPGKWWYVPCDPVSFESKMDYVKGCA |
| | AVKVGQPLRQPAQTNADGAASKIRKGKKNRT |
| | AGTSKEKVYLWRDISAFPLESNEIGEWKETS |
| | AYQNDVQYRVIRMLKEHIKSLDNRTGDNVEG |
| Desulfonatronum | MVLGRKDDTAELRRALWTTHEHVNLAVAEVE |
| thiodismutans | RVLLRCRGRSYWTLDRRGDPVHVPESQVAED |
| (SEQ ID | ALAMAREAQRRNGWPVVGEDEEILLALRYLY |
| NO: 382) | EQIVPSCLLDDLGKPLKGDAQKIGTNYAGPL |
| | FDSDTCRRDEGKDVACCGPFHEVAGKYLGAL |
| | PEWATPISKQEFDGKDASHLRFKATGGDDAF |
| | FRVSIEKANAWYEDPANQDALKNKAYNKDDW |
| | KKEKDKGISSWAVKYIQKQLQLGQDPRTEVR |
| | RKLWLELGLLPLFIPVFDKTMVGNLWNRLAV |
| | RLALAHLLSWESWNHRAVQDQALARAKRDEL |
| | AALFLGMEDGFAGLREYELRRNESIKQHAFE |
| | PVDRPYVVSGRALRSWTRVREEWLRHGDTQE |
| | SRKNICNRLQDRLRGKFGDPDVFHWLAEDGQ |
| | EALWKERDCVTSFSLLNDADGLLEKRKGYAL |
| | MTFADARLHPRWAMYEAPGGSNLRTYQIRKT |
| | ENGLWADVVLLSPRNESAAVEEKTFNVRLAP |
| | SGQLSNVSFDQIQKGSKMVGRCRYQSANQQF |
| | EGLLGGAEILFDRKRIANEQHGATDLASKPG |
| | HVWFKLTLDVRPQAPQGWLDGKGRPALPPEA |
| | KHFKTALSNKSKFADQVRPGLRVLSVDLGVR |
| | SFAACSVFELVRGGPDQ |
| | GTYFPAADGRTVDDPEKLWAKHERSFKIT |
| | LPGENPSRKEEIARRAAMEELRSLNGDIR |
| | RLKAILRLSVLQEDDPRTEHLRLFMEAIV |
| | DDPAKSALNAELFKGFGDDRFRSTPDLWK |
| | QHCHFFHDKAEKVVAERFSRWRTETRPKS |
| | SSWQDWRERRGYAGGKSYWAVTYLEAVRG |
| | LILRWNMRGRTYGEVNRQDKKQFGTVASA |
| | LLHHINQLKEDRIKTGADMIIQAARGFVP |
| | RKNGAGWVQVHEPCRLILFEDLARYRFRT |
| | DRSRRENSRLMRWSHREIVNEVGMQGELY |
| | GLHVDTTEAGFSSRYLASSGAPGVRCRHL |
| | VEEDFHDGLPGMHLVGELDWLLPKDKDRT |
| | ANEARRLLGGMVRPGMLVPWDGGELFATL |
| | NAASQLHVIHADINAAQNLQRRFWGRCGE |
| | AIRIVCNQLSVDGSTRYEMAKAPKARLLG |
| | ALQQLKNGDAPFHLTSIPNSQKPENSYVM |
| | TPTNAGKKYRAGPGEKSSGEEDELALDIV |
| | EQAEELAQGRKTFFRDPSGVFFAPDRWLP |
| | SEIYWSRIRRRIWQVTLERNSSGRQERAE |
| | MDEMPY |
| Lentisphaeria | MAVELNRIYQGRVNHVYIFDENQNQVSVD |
| bacterium | NGDDLLFVHHELYQDAINYYLVALAAMAL |
| (SEQ ID | DSKDSLFGKFKMQIRAVWNDFYRNGQLRP |
| NO: 383) | GLKHSLIRSLGHAAELNTSNGADIAMNLI |
| | LEDGGIPSEILNAALEHLAEKCTGDVSQL |
| | GKTFFPRFCDTAYHGNWDVDAKSFSEKKG |
| | RQRLVDALYSLHPVQAVQELAPEIEIGWG |
| | GVKTQTGKFFTGDEAKASLKKAISYFLQD |
| | TGKNSPELQEYFSVAGKQPLEQYLGKIDT |
| | FPEISFGRISSHQNINISNAMWILKFFPD |
| | QYSVDLIKNLIPNKKYEIGIAPQWGDDPV |
| | KLSRGKRGYTFRAFTDLAMWEKNWKVFDR |
| | AAFSDALKTINQFRNKTQERNDQLKRYCA |
| | ALNWMDGESSDKKPPVEPADADAVDEAAT |
| | SVLPILAGDKRWNALLQLQKELGICNDFT |
| | ENELMDYGLSLRTIRGYQKLRSMMLEKEE |
| | KMRAKTADDEEISQALQEIIIKFQSSHRD |
| | TIGSVSLFLKLAEPKYFCVWHDADKNQNF |
| | ASVDMVADAVRYYSYQEEKARLEEPIQIT |
| | PADARYSRRVSDLYALVYKNAKECKTGYG |
| | LRPDGNFVFEIAQKNAKGYAPAKVVLAFS |
| | APRLKRDGLIDKEFSAYYPPVLQAFLREE |
| | EAPKQSFKTTAVILMPDWDKNGKRRILLN |
| | FPIKLDVSAIHQKTDHRFENQFYFANNTN |
| | TCLLWPSYQYKKPVTWYQGKKPFDVVAVD |
| | LGQRSAGAVSRITVSTEKREHSVAIGEAG |
| | GTQWYAYRKFSGLLRLPGEDATVIRDGQR |
| | TEELSGNAGRLSTEEETVQACVLCKMLIG |
| | DATLLGGSDEKTIRSFPKQNDKLLIAFRR |
| | ATGRMKQLQRWLWMLNENGLCDKAKTEIS |
| | NSDWLVNKNIDNVLKEEKQHREMLPAILL |
| | QIADRVLPLRGRKWDWVLNPQSNSFVLQQ |
| | TAHGSGDPHKKICGQRGLSFARIEQLESL |
| | RMRCQALNRILMRKTGEKPATLAEMRNNP |
| | IPDCCPDILMRLDAMKEQRINQTANLILA |
| | QALGLRHCLHSESATKRKENGMHGEYEKI |
| | PGVEPAAFVVLEDLSRYRFSQDRSSYENS |
| | RLMKWSHRKILEKLALLCEVFNVPILQVG |
| | AAYSSKFSANAIPGFRAEECSIDQLSFYP |
| | WRELKDSREKALVEQIRKIGHRLLTFDAK |
| | ATIIMPRNGGPVFIPFVPSDSKDTLIQAD |
| | INASFNIGLRGVADATNLLCNNRVSCDRK |
| | KDCWQVKRSSNFSKMVYPEKLSLSFDPIK |
| | KQEGAGGNFFVLGCSERILTGTSEKSPVF |
| | TSSEMAKKYPNLMFGSALWRNEILKLERC |
| | CKINQSRLDKFIAKKEVQNEL |
| Laceyella | MSIRSFKLKIKTKSGVNAEELRRGLWRTH |
| sediminis | QLINDGIAYYMNWLVLLRQEDLFIRNEET |
| (SEQ ID | NEIEKRSKEEIQGELLERVHKQQQRNQWS |
| NO: 384) | GEVDDQTLLQTLRHLYEEIVPSVIGKSGN |
| | ASLKARFFLGPLVDPNNKTTKDVSKSGPT |
| | PKWKKMKDAGDPNWVQEYEKYMAERQTLV |
| | RLEEMGLIPLFPMYTDEVGDIHWLPQASG |
| | YTRTWDRDMFQQAIERLLSWESWNRRVRE |
| | RRAQFEKKTHDFASRFSESDVQWMNKLRE |
| | YEAQQEKSLEENAFAPNEPYALTKKALRG |
| | WERVYHSWMRLDSAASEEAYWQEVATCQT |
| | AMRGEFGDPAIYQFLAQKENHDIWRGYPE |
| | RVIDFAELNHLQRELRRAKE |
| | DATFTLPDSVDHPLWVRYEAPGGTNIHGY |
| | DLVQDTKRNLTLILDKFILPDENGSWHEV |
| | KKVPFSLAKSKQFHRQVWLQEEQKQKKRE |
| | VVFYDYSTNLPHLGTLAGAKLQWDRNFLN |
| | KRTQQQIEETGEIGKVFFNISVDVRPAVE |
| | VKNGRLQNGLGKALTVLTHPDGTKIVTGW |
| | KAEQLEKWVGESGRVSSLGLDSLSEGLRV |
| | MSIDLGQRTSATVSVFEITKEAPDNPYKF |
| | FYQLEGTELFAVHQRSFLLALPGENPPQK |
| | IKQMREIRWKERNRIKQQVDQLSAILRLH |
| | KKVNEDERIQAIDKLLQKVASWQLNEEIA |
| | TAWNQALSQLYSKAKENDLQWNQAIKNAH |
| | HQLEPVVGKQISLWRKDLSTGRQGIAGLS |
| | LWSIEELEATKKLLTRWSKRSREPGVVKR |
| | IERFETFAKQIQHHINQVKENRLKQLANL |
| | IVMTALGYKYDQEQKKWIEVYPACQWLFE |
| | NLRSYRFSYERSRRENKKLMEWSHRSIPK |
| | LVQMQGELFGLQVADVYAAYSSRYHGRTG |
| | APGIRCHALTEADLRNETNIIHELIEAGF |
| | IKEEHRPYLQQGDLVPWSGGELFATLQKP |
| | YDNPRILTLHADINAAQNIQKRFWHPSMW |
| | FRVNCESVMEGEIVTYVPKNKTVHKKQGK |
| | TFRFVKVEGSDVYEWAKWSKNRNKNTFSS |
| | ITERKPPSSMILFRDPSGTFFKEQEWVEQ |
| | KTFWGKVQSMIQAYMKKTIVQRMEE |
| Methylobacterium | MYEAIVLADDANAQLANAFLGPLTDPNSA |
| nodulans | GFLEAFNKVDRPAPSWLDQVPASDPIDPA |
| (long form) | VLAEANAWLDTDAGRAWLVDTGAPPRWRS |
| (SEQ ID | LAAKQDPIWPREFARKLGELRKEAASGTS |
| NO: 385) | AIIKALKRDFGVLPLFQPSLAPRILGSRS |
| | SLTPWDRLAFRLAVGHLLSWESWCTRARD |
| | EHTARVQRLEQFSSAHLKGDLATKVSTLR |
| | EYERARKEQIAQLGLPMGERDFLITVRMT |
| | RGWDDLREKWRRSGDKGQEALHAIIATEQ |
| | TRKRGRFGDPDLFRWLARPENMHVWADGH |
| | ADAVGVLARVNAMERLVERSRDTALMTLP |
| | DPVAHPRSAQWEAEGGSNLRNYQLEAVGG |
| | ELQITLPLLKAADDGRCIDTPLSFSLAPS |
| | DQLQGVVLTKQDKQQKITYCTNMNEVFEA |
| | KLGSADLLLNWDHLRGRIRDRVDAGDIGS |
| | AFLKLALDVAHVLPDGVDDQLARAAFHFQ |
| | SAKGAKSKHADSVQAGLRVLSIDLGVRSF |
| | ATCSVFELKDTAPTTGVAFPLAEFRLWAV |
| | HERSFTLELPGENVGAAGQQWRAQADAEL |
| | RQLRGGLNRHRQLLRAATVQKGERDAYLT |
| | DLREAWSAKELWPFEASLLSELERCSTVA |
| | DPLWQDTCKRAARLYRTEFGAVVSEWRSR |
| | TRSREDRKYAGKSMWSVQHLTDVRRFLQS |
| | WSLAGRASGDIRRLDRERGGVFAKDLLDH |
| | IDALKDDRLKTGADLIVQAARGFQRNEFG |
| | YWVQKHAPCHVILFEDLSRYRMRTDRPRR |
| | ENSQLMQWAHRGVPDMVGMQGEIYGIQDR |
| | RDPDSARKHARQPLAAFCLDTPAAFSSRY |
| | HASTMTPGIRCHPLRKREFEDQGFLELLK |
| | RENEGLDLNGYKPGDLVPLPGGEVFVCLN |
| | ANGLSRIHADINAAQNLQRRFWTQHGDAF |
| | RLPCGKSAVQGQIRWAPLSMGKRQAGALG |
| | GFGYLEPTGHDSGSCQWRKTTEAEWRRLS |
| | GAQKDRDEAAAAEDEELQGLEEELLERSG |
| | ERVVFFRDPSGWLPTDLWFPSAAFWSIVR |
| | AKTVGRLRSHLDAQAEASYAVAAGL |
| Opitutaceae | MSLNRIYQGRVAAVETGTALAKGNVEWMP |
| bacterium | AAGGDEVLWQHHELFQAAINYYLVALLAL |
| (SEQ ID | ADKNNPVLGPLISQMDNPQSPYHVWGSFR |
| NO: 386) | RQGRQRTGLSQAVAPYITPGNNAPTLDEV |
| | FRSILAGNPTDRATLDAALMQLLKACDGA |
| | GAIQQEGRSYWPKFCDPDSTANFAGDPAM |
| | LRREQHRLLLPQVLHDPAITHDSPALGSF |
| | DTYSIATPDTRTPQLTGPKARARLEQAIT |
| | LWRVRLPESAADFDRLASSLKKIPDDDSR |
| | LNLQGYVGSSAKGEVQARLFALLLFRHLE |
| | RSSFTLGLLRSATPPPKNAETPPPAGVPL |
| | PAASAADPVRIARGKRSFVFRAFTSLPCW |
| | HGGDNIHPTWKSFDIAAFKYALTVINQIE |
| | EKTKERQKECAELETDFDYMHGRLAKIPV |
| | KYTTGEAEPPPILANDLRIPLLRELLQNI |
| | KVDTALTDGEAVSYGLQRRTIRGFRELRR |
| | IWRGHAPAGTVFSSELKEKLAGELRQFQT |
| | DNSTTIGSVQLFNELIQNPKYW |
| | PIWQAPDVETARQWADAGFADDPLAALV |
| | QEAELQEDIDALKAPVKLTPADPEYSRR |
| | QYDFNAVSKFGAGSRSANRHEPGQTERG |
| | HNTFTTEIAARNAADGNRWRATHVRIHY |
| | SAPRLLRDGLRRPDTDGNEALEAVPWLQ |
| | PMMEALAPLPTLPQDLTGMPVFLMPDVT |
| | LSGERRILLNLPVTLEPAALVEQLGNAG |
| | RWQNQFFGSREDPFALRWPADGAVKTAK |
| | GKTHIPWHQDRDHFTVLGVDLGTRDAGA |
| | LALLNVTAQKPAKPVHRIIGEADGRTWY |
| | ASLADARMIRLPGEDARLFVRGKLVQEP |
| | YGERGRNASLLEWEDARNIILRLGQNPD |
| | ELLGADPRRHSYPEINDKLLVALRRAQA |
| | RLARLQNRSWRLRDLAESDKALDEIHAE |
| | RAGEKPSPLPPLARDDAIKSTDEALLSQ |
| | RDIIRRSFVQIANLILPLRGRRWEWRPH |
| | VEVPDCHILAQSDPGTDDTKRLVAGQRG |
| | ISHERIEQIEELRRRCQSLNRALRHKPG |
| | ERPVLGRPAKGEEIADPCPALLEKINRL |
| | RDQRVDQTAHAILAAALGVRLRAPSKDR |
| | AERRHRDIHGEYERFRAPADFVVIENLS |
| | RYLSSQDRARSENTRLMQWCHRQIVQKL |
| | RQLCETYGIPVLAVPAAYSSRFSSRDGS |
| | AGFRAVHLTPDHRHRMPWSRILARLKAH |
| | EEDGKRLEKTVLDEARAVRGLFDRLDRF |
| | NAGHVPGKPWRTLLAPLPGGPVFVPLGD |
| | ATPMQADLNAAINIALRGIAAPDRHDIH |
| | HRLRAENKKRILSLRLGTQREKARWPGG |
| | APAVTLSTPNNGASPEDSDALPERVSNL |
| | FVDIAGVANFERVTIEGVSQKFATGRGL |
| | WASVKQRAWNRVARLNETVTDNNRNEEE |
| | DDIPM |
| Bacillus sp. | MAIRSIKLKLKTHTGPEAQNLRKGIWRT |
| NSP2.1 | HRLLNEGVAYYMKMLLLFRQESTGERPK |
| (SEQ ID | EELQEELICHIREQQQRNQADKNTQALP |
| NO: 387) | LDKALEALRQLYELLVPSSVGQSGDAQI |
| | ISRKFLSPLVDPNSEGGKGTSKAGAKPT |
| | WQKKKEANDPTWEQDYEKWKKRREEDPT |
| | ASVITTLEEYGIRPIFPLYTNTVTDIAW |
| | LPLQSNQFVRTWDRDMLQQAIERLLSWE |
| | SWNKRVQEEYAKLKEKMAQLNHQLHGGQ |
| | EWISLLEQYEENRERELRENMTAANDKY |
| | RITKRQIVIKGWNELYELWSTFPASASH |
| | EQYKEALKRVQQRLRGRFGDAHFFQYLM |
| | EEKNRLIWKGNPQRIHYFVARNELTKRL |
| | EEAKQSATMTLPNARKHPLWVRFDARGG |
| | NLQDYYLTAEADKPRSRRFVTFSQLIWP |
| | SESGWMEKKDVEVELALSRQFYQQVKLL |
| | KNDKGKQKIEFKDKGSGSTFNGHLGGAK |
| | LQLERGDLEKEEKNFEDGEIGSVYLNVV |
| | IDFEPLQEVKNGRVQAPYGQVLQLIRRP |
| | NEFPKVTTYKSEQLVEWIKASPQHSAGV |
| | ESLASGFRVMSIDLGLRAAAATSIFSVE |
| | ESSDKNAADFSYWIEGTPLVAVHQRSYM |
| | LRLPGEQVEKQVMEKRDERFQLHQRVKF |
| | QIRVLAQIMRMANKQYGDRWDELDSLKQ |
| | AVEQKKSPLDQTDRTFWEGIVCDLTKVL |
| | PRNEADWEQAVVQIHRKAEEYVGKAVQA |
| | WRKRFAADERKGIAGLSMWNIEELEGLR |
| | KLLISWSRRTRNPQEVNRFERGHTSHQR |
| | LLTHIQNVKEDRLKQLSHAIVMTALGYV |
| | YDERKQEWCAEYPACQVILFENLSQYRS |
| | NLDRSTKENSTLMKWAHRSIPKYVHMQA |
| | EPYGIQIGDVRAEYSSRFYAKTGTPGIR |
| | CKKVRGQDLQGRRFENLQKRLVNEQFLT |
| | EEQVKQLRPGDIVPDDSGELFMTLTDGS |
| | GSKEVVFLQADINAAHNLQKRFWQRYNE |
| | LFKVSCRVIVRDEEEYLVPKTKSVQAKL |
| | GKGLFVKKSDTAWKDVYVWDSQAKLKGK |
| | TTFTEESESPEQLEDFQEIIEEAEEAKG |
| | TYRTLFRDPSGVFFPESVWYPQKDFWGE |
| | VKRKLYGKLRERFLTKAR |
| Methylobacterium | MLTKQDKQQKITYCTNMNEVFEAKLGSA |
| nodulans | DLLLNWDHLRGRIRDRVDAGDIGSAFLK |
| (short form) | LALDVAHVLPDGVDDQLARAAFHFQSAK |
| (SEQ ID | GAKSKHADSVQAGLRVLSIDLGVRSFAT |
| NO: 388) | CSVFELKDTAPTTGVAFPLAEFRLWAVH |
| | ERSFTLELPGENVGAAGQQWRAQADAEL |
| | RQLRGGLNRHRQLLRAATVQKGERDAYL |
| | TDLREAWSAKELWPFEASLLSELERCST |
| | VADPLWQDTCKRAARLYRTEFGAVVSEW |
| | RSRTRSREDRKYAGKSMWSVQHLTDVRR |
| | FLQSWSLAGRASGDIRRLDRERGGVFAK |
| | DLLDHIDALKDDRLKTGADLIVQAARGF |
| | QRNEFGYWVQKHAPCHVILFEDLSRYRM |
| | RTDRPRRENSQLMQWAHRGVPDMVGMQG |
| | EIYGIQDRRDPDSARKHARQPLAAFCLD |
| | TPAAFSSRYHASTMTPGIRCHPLRKREF |
| | EDQGFLELLKRENEGLDLNGYKPGDLVP |
| | LPGGEVFVCLNANGLSRIHADINAAQNL |
| | QRRFWTQHGDAFRLPCGKSAVQGQIRWA |
| | PLSMGKRQAGALGGFGYLEPTGHDSGSC |
| | QWRKTTEAEWRRLSGAQKDRDEAAAAED |
| | EELQGLEEELLERSGERWFFRDPSGVVL |
| | PTDLWFPSAAFWSIVRAKTVGRLRSHLD |
| | AQAEASYAVAAGL |

[0526] In certain embodiments, the C2c1 effector protein is from or originates from a species selected from the genus Lentisphaeria or Laceyella.

[0527] In certain embodiments, the C2c1 effector protein is from or originates from a species selected from Alicyclobacillus kakegawensis, Bacillus sp. V3-13, Lentisphaeria bacterium, or Laceyella sediminis.

[0528] In certain embodiments, the C2c1 effector protein is from or originates from a species selected from Alicyclobacillus kakegawensis wherein the wild type sequence corresponds to the sequence of WP 067936067, Bacillus sp. V3-13 wherein the wild type sequence corresponds to the sequence of WP 101661451, Lentisphaeria bacterium wherein the wild type sequence corresponds to the sequence of DCFZ01000012, or Laceyella sediminis wherein the wild type sequence corresponds to the sequence of WP 106341859.

[0529] In certain embodiments, the C2c1 effector protein is from or originates from a species selected from Table 2 and has a wild type sequence as indicated in Table 2. It will be understood that mutated or truncated Cas12b proteins as described herein elsewhere may deviate from the sequence indicated.

TABLE 2
Cas12b orthologues

| Species | Sequence |
|---|---|
| Alicyclobacillus | MAVKSIKVKLRLSECPDILAGMWQLHRA |
| kakegawensis | TNAGVRYYTEWVSLMRQEILYSRGPDGG |
| (SEQ ID | QQCYMTAEDCQRELLRRLRNRQLHNGRQ |
| NO: 389) | DQPGTDADLLAISRRLYEILVLQSIGKR |
| | GDAQQIASSFLSPLVDPNSKGGRGEAKS |
| | GRKPAWQKMRDQGDPRWVAAREKYEQRK |
| | AVDPSKEILNSLDALGLRPLFAVFTETY |
| | RSGVDWKPLGKSQGVRTWDRDMFQQALE |
| | RLMSWESWNRRVGEEYARLFQQKMKFEQ |
| | EHFAEQSHLVKLARALEADMRAASQGFE |
| | AKRGTAHQITRRALRGADRVFEIWKSIP |
| | EEALFSQYDEVIRQVQAEKRRDFGSHDL |
| | FAKLAEPKYQPLWRADETFLTRYALYNG |
| | VLRDLEKARQFATFTLPDACVNPIWTRF |
| | ESSQGSNLHKYEFLFDHLGPGRHAVRFQ |
| | RLLVVESEGAKERDSVVVPVAPSGQLDK |
| | LVLREEEKSSVALHLHDTARPDGFMAEW |
| | AGAKLQYERSTLARKARRDKQGMRSW |
| | RRQPSMLMSAAQMLEDAKQAGDVYLNIS |
| | VRVKSPSEVRGQRRPPYAALFRIDDKQR |
| | RVTVNYNKLSAYLEEHPDKQIPGAPGLL |
| | SGLRVMSVDLGLRTSASISVFRVAKKEE |
| | VEALGDGRPPHYYPIHGTDDLVAVHERS |
| | HLIQMPGETETKQLRKLREERQAVLRPL |
| | FAQLALLRLLVRCGAADERIRTRSWQRL |
| | TKQGREFTKRLTPSWREALELELTRLEA |
| | YCGRVPDDEWSRIVDRTVIALWRRMGKQ |
| | VRDWRKQVKSGAKVKVKGYQLDVVGGNS |
| | LAQIDYLEQQYKFLRRWSFFARASGLVV |
| | RADRESHFAVALRQHIENAKRDRLKKLA |
| | DRILMEALGYVYEASGPREGQWTAQHPP |
| | CQLIILEELSAYRFSDDRPPSENSKLMA |
| | WGHRGILEELVNQAQVHDVLVGTVYAAF |
| | SSRFDARTGAPGVRCRRVPARFVGATVD |
| | DSLPLWLTEFLDKHRLDKNLLRPDDVIP |
| | TGEGEFLVSPCGEEAARVRQVHADINAA |
| | QNLQRRLWQNFDITELRLRCDVKMGGEG |
| | TVLVPRVNNARAKQLFGKKVLVSQDGVT |
| | FFERSQTGGKPHSEKQTDLTDKELELIA |
| | EADEARAKSVVLFRDPSGIIIGKGIIWI |
| | RQREFWSLYKQRIESHTAERIRVRGVGS |
| | SLD |
| Bacillus sp._ | MAIRSIKLKMKTNSGTDSIYLRKALWRT |
| V3-13 | HQLINEGIAYYMNLLTLYRQEAIGDKTK |
| (SEQ ID | EAYQAELINIIRNQQRNNGSSEEHGSDQ |
| NO: 390) | EILALLRQLYELIIPSSIGESGDANQLG |
| | NKFLYPLVDPNSQSGKGTSNAGRKPRWK |
| | RLKEEGNPDWELEKKKDEERKAKDPTVK |
| | IFDNLNKYGLLPLFPLFTNIQKDIEWLP |
| | LGKRQSVRKWDKDMFIQAIERLLSWESW |
| | NRRVADEYKQLKEKTESYYKEHLTGGEE |
| | WIEKIRKFEKERNMELEKNAFAPNDGYF |
| | ITSRQIRGWDRVYEKWSKLPESASPEEL |
| | WKWAEQQNKMSEGFGDPKVFSFLANREN |
| | RDIWRGHSERIYHIAAYNGLQKKLSRTK |
| | EQATFTLPDAIEHPLWIRYESPGGTNLN |
| | LFKLEEKQKKNYYVTLSKIIWPSEEKWI |
| | EKENIEIPLAPSIQFNRQIKLKQHVKGK |
| | QEISFSDYSSRISLDGVLGGSRIQFNRK |
| | YIKNHKELLGEGDIGPVFFNLVVDVAPL |
| | QETRNGRLQSPIGKALKVISSDFSKVID |
| | YKPKELMDWMNTGSASNSFGVASLLEGM |
| | RVMSIDMGQRTSASVSIFEVVKELPKDQ |
| | EQKLFYSINDTELFAIHKRSFLLNLPGE |
| | VVTKNNKQQRQERRKKRQFVRSQIRMLA |
| | NVLRLETKKTPDERKKAIHKLMEIVQSY |
| | DSWTASQKEVWEKELNLLTNMAAFNDEI |
| | WKESLVELHHRIEPYVGQIVSKWRKGLS |
| | EGRKNLAGISMWNIDELEDTRRLLISWS |
| | KRSRTPGEANRIETDEPFGSSLLQHIQN |
| | VKDDRLKQMANLIIMTALGFKYDKEEKD |
| | RYKRWKETYPACQIILFENLNRYLFNLD |
| | RSRRENSRLMKWAHRSIPRTVSMQGEMF |
| | GLQVGDVRSEYSSRFHAKTGAPGIRCHA |
| | LTEEDLKAGSNTLKRLIEDGFINESELA |
| | YLKKGDIIPSQGGELFVTLSKRYKKDSD |
| | NNELTVIHADINAAQNLQKRFWQQNSEV |
| | YRVPCQLARMGEDKLYIPKSQTETIKKY |
| | FGKGSFVKNNTEQEVYKWEKSEKMKIKT |
| | DTTFDLQDLDGFEDISKTIELAQEQQKK |
| | YLTMFRDPSGYFFNNETWRPQKEYWSIV |
| | NNIIKSCLKKKILSNKVEL |
| Lentisphaeria | MAVELNRIYQGRVNFIVYIFDENQNQVS |
| bacterium | VDNGDDLLFVHHELYQDAINYYLVALAA |
| (SEQ ID | MALDSKDSLFGKFKMQIRAVWNDFYRNG |
| NO: 391) | QLRPGLKHSLIRSLGHAAELNTSNGADI |
| | AMNLILEDGGIPSEILNAALEHLAEKCT |
| | GDVSQLGKTFFPRFCDTAYHGNWDVDAK |
| | SFSEKKGRQRLVDALYSLFLPVQAVQEL |
| | APEIEIGWGGVKTQTGKFFTGDEAKASL |
| | KKAISYFLQDTGKNSPELQEYFSVAGKQ |
| | PLEQYLGKIDTFPEISFGRISSHQNINI |
| | SNAMWILKFFPDQYSVDLIKNLIPNKKY |
| | EIGIAPQWGDDPVKLSRGKRGYTFRAFT |
| | DLAMWEKNWKVFDRAAFSDALKTINQFR |
| | NKTQERNDQLKRYCAALNWMDGESSDKK |
| | PPVEPADADAVDEAATSVLPILAGDKRW |
| | NALLQLQKELGICNDFTENELMDYGLSL |
| | RTIRGYQKLRSMMLEKEEKMRAKTADDE |
| | EISQALQEIIIKFQSSHRDTIGSVSLFL |
| | KLAEPKYFCVWHDADKNQNFASVDMVAD |
| | AVRYYSYQEEKARLEEPIQITPADARY |
| | SRRVSDLYALVYKNAKECKTGYGLRPDG |
| | NFVFEIAQKNAKGYAPAKWLAFSAPRLK |
| | RDGLIDKEFSAYYPPVLQAFLREEEAPK |
| | QSFKTTAVILMPDWDKNGKRRILLNFPI |
| | KLDVSAIHQKTDHRFENQFYFANNTNTC |
| | LLWPSYQYKKPVTWYQGKKPFDVVAVDL |
| | GQRSAGAVSRITVSTEKREHSVAIGEAG |
| | GTQWYAYRKFSGLLRLPGEDATVIRDGQ |
| | RTEELSGNAGRLSTEEETVQACVLCKML |
| | IGDATLLGGSDEKTIRSFPKQNDKLLIA |
| | FRRATGRMKQLQRWLWMLNENGLCDKAK |
| | TEISNSDWLVNKNIDNVLKEEKQHREML |
| | PAILLQIADRVLPLRGRKWDWVLNPQSN |
| | SFVLQQTAHGSGDPHKKICGQRGLSFAR |
| | IEQLESLRMRCQALNRILMRKTGEKPAT |
| | LAEMRNNPIPDCCPDILMRLDAMKEQRI |
| | NQTANLILAQALGLRHCLHSESATKRKE |
| | NGMHGEYEKIPGVEPAAFVVLEDLSRYR |
| | FSQDRSSYENSRLMKWSHRKILEKLALL |
| | CEVFNVPILQVGAAYSSKFSANAIPGFR |
| | AEECSIDQLSFYPWRELKDSREKALVEQ |
| | IRKIGHRLLTFDAKATIIMPRNGGPVFI |
| | PFVPSDSKDTLIQADINASFNIGLRGVA |
| | DATNLLCNNRVSCDRKKDCWQVKRSSNF |
| | SKMVYPEKLSLSFDPIKKQEGAGGNFFV |
| | LGCSERILTGTSEKSPVFTSSEMAKKYP |
| | NLMFGSALWRNEILKLERCCKINQSRLD |
| | KFIAKKEVQNEL |
| Laceyella | MSIRSFKLKIKTKSGVNAEELRRGLWRT |
| sediminis (SEQ | HQLINDGIAYYMNWLVLLRQEDLFIRNE |
| ID NO: 392) | ETNEIEKRSKEEIQGELLERVHKQQQRN |
| | QWSGEVDDQTLLQTLRHLYEEIVPSVIG |
| | KSGNASLKARFFLGPLVDPNNKTTKDVS |
| | KSGPTPKWKKMKDAGDPNWVQEYEKYMA |
| | ERQTLVRLEEMGLIPLFPMYTDEVGDIH |
| | WLPQASGYTRTWDRDMFQQAIERLLSWE |
| | SWNRRVRERRAQFEKKTHDFASRFSESD |
| | VQWMNKLREYEAQQEKSLEENAFAPNEP |
| | YALTKKALRGWERVYHSWMRLDSAASEE |
| | AYWQEVATCQTAMRGEFGDPAIYQFLAQ |
| | KENHDIWRGYPERVIDFAELNHLQRELR |
| | RAKEDATFTLPDSVDHPLWVRYEAPGGT |
| | NIHGYDLVQDTKRNLTLILDKFILPDEN |
| | GSWHEVKKVPFSLAKSKQFHRQVWLQEE |
| | QKQKKREVVFYDYSTNLPHLGTLAGAKL |
| | QWDRNFLNKRTQQQIEETGEIGKVFFNI |
| | SVDVRPAVEVKNGRLQNGLGKALTVLTH |
| | PDGTKIVTGWKAEQLEKWVGESGRVSSL |
| | GLDSLSEGLRVMSIDLGQRTSATVSVFE |
| | ITKEAPDNPYKFFYQLEGTELFAVHQRS |
| | FLLALPGENPPQKIKQMREIRWKERNRI |
| | KQQVDQLSAILRLHKKVNEDERIQAIDK |
| | LLQKVASWQLNEEIATAWNQALSQLYSK |
| | AKENDLQWNQAIKNAHHQLEPVVGKQIS |
| | LWRKDLSTGRQGIAGLSLWSIEELEATK |
| | KLLTRWSKRSREPGVVKRIERFETFAKQ |
| | IQHHINQVKENRLKQLANLIVMTALGYK |
| | YDQEQKKWIEVYPACQVVLFENLRSYRF |
| | SYERSRRENKKLMEWSHRSIPKLVQMQG |
| | ELFGLQVADVYAAYSSRYHGRTGAPGIR |
| | CHALTEADLRNETNIIHELIEAGFIKEE |
| | HRPYLQQGDLVPWSGGELFATLQKPYDN |
| | PRILTLHADINAAQNIQKRFWHPSMWFR |
| | VNCESVMEGEIVTYVPKNKTVHKKQGKT |
| | FRFVKVEGSDVYEWAKWSKNRNKNTFSS |
| | ITERKPPSSMILFRDPSGTFFKEQEWVE |
| | QKTFWGKVQSMIQAYMKKTIVQRMEE |

[0530] The effector protein may comprise a chimeric effector protein comprising a first fragment from a first effector protein (e.g., a C2c1) ortholog and a second fragment from a second effector (e.g., a C2c1) protein ortholog, and wherein the first and second effector protein orthologs are different. At least one of the first and second effector protein (e.g., a C2c1) orthologs may comprise an effector protein (e.g., a C2c1) from or originates from an organism comprising Alicyclobacillus, Desulfovibrio, Desulfonatronum, Opitutaceae, Tuberibacillus, Bacillus, Brevibacillus, Candidatus, Desulfatirhabdium, Elusimicrobia, Citrobacter, Methylobacterium, Omnitrophicai, Phycisphaerae, Planctomycetes, Spirochaetes, Verrucomicrobiaceae, Lentisphaeria or Laceyella; e.g., a chimeric effector protein comprising a first fragment and a second fragment wherein each of the first and second fragments is selected from a C2c1 of an organism comprising Alicyclobacillus, Desulfovibrio, Desulfonatronum, Opitutaceae, Tuberibacillus, Bacillus, Brevibacillus, Candidatus, Desulfatirhabdium, Elusimicrobia, Citrobacter, Methylobacterium, Omnitrophicai, Phycisphaerae, Planctomycetes, Spirochaetes, Verrucomicrobiaceae, Lentisphaeria or Laceyella wherein the first and second fragments are not from the same bacteria; for instance a chimeric effector protein comprising a first fragment and a second fragment wherein each of the first and second fragments is selected from a C2c1 of Alicyclobacillus acidoterrestris (e.g., ATCC 49025), Alicyclobacillus contaminans (e.g., DSM 17975), Alicyclobacillus macrosporangiidus (e.g. DSM 17980), Bacillus hisashii strain C4, Candidatus Lindowbacteria bacterium RIFCSPLOWO2, Desulfovibrio inopinatus (e.g., DSM 10711), Desulfonatronum thiodismutans (e.g., strain MLF-1 or genbank accession number WP_031386437), Elusimicrobia bacterium RIFOXYA12, Omnitrophica WOR_2 bacterium RIFCSPHIGHO2, Opitutaceae bacterium TAV5 or genbank accession number WP_009513281, Phycisphaerae bacterium ST-NAGAB-D1, Planctomycetes bacterium RBG_13_46_10, Spirochaetes bacterium GWB1_27_13, Verrucomicrobiaceae bacterium UBA2429, Tuberibacillus calidus (e.g., DSM 17572), Bacillus thermoamylovorans (e.g., strain B4166), Brevibacillus sp. CF112, Bacillus sp. NSP2.1, Desulfatirhabdium butyrativorans (e.g., DSM 18734 or genbank accession number WP_028326052), Alicyclobacillus herbarius (e.g., DSM 13609), Citrobacter freundii (e.g., ATCC 8090), Brevibacillus agri (e.g., BAB-2500), Methylobacterium nodulans (e.g., ORS 2060 or genbank accession number WP_043747912), Alicyclobacillus kakegawensis (e.g. genbank accession number WP_067936067), Bacillus sp. V3-13 (e.g. genbank accession number WP_101661451), Lentisphaeria bacterium (e.g. from DCFZ01000012), Laceyella_sediminis (e.g. genbank accession number WP_106341859), wherein the first and second fragments are not from the same bacteria. As used herein, when a Cas12 protein (e.g., Cas12b) originates form a species, it may be the wild type Cas12 protein in the species, or a homolog of the wild type Cas12 protein in the species. The Cas12 protein that is a homolog of the wild type Cas12 protein in the species may comprise one or more variations (e.g., mutations, truncations, etc.) of the wild type Cas12 protein.

[0531] In a more preferred embodiment, the C2c1b is derived or originates from a bacterial species selected from Alicyclobacillus acidoterrestris (e.g., ATCC 49025), Alicyclobacillus contaminans (e.g., DSM 17975), Alicyclobacillus macrosporangiidus (e.g. DSM 17980), Bacillus hisashii strain C4, Candidatus Lindowbacteria bacterium RIFCSPLOWO2, Desulfovibrio inopinatus (e.g., DSM 10711), Desulfonatronum thiodismutans (e.g., strain MLF-1 or genbank accession number WP_031386437), Elusimicrobia bacterium RIFOXYA12, Omnitrophica WOR_2 bacterium RIFCSPHIGHO2, Opitutaceae bacterium TAV5 or genbank accession number WP_009513281, Phycisphaerae bacterium ST-NAGAB-D1, Planctomycetes bacterium RBG_13_46_10, Spirochaetes bacterium GWB1_27_13, Verrucomicrobiaceae bacterium UBA2429, Tuberibacillus calidus (e.g., DSM 17572), Bacillus thermoamylovorans (e.g., strain B4166), Brevibacillus sp. CF112, Bacillus sp. NSP2.1, Desulfatirhabdium butyrativorans (e.g., DSM 18734 or genbank accession number WP_028326052), Alicyclobacillus herbarius (e.g., DSM 13609), Citrobacter freundii (e.g., ATCC 8090), Brevibacillus agri (e.g., BAB-2500), Methylobacterium nodulans (e.g., ORS 2060 or genbank accession number WP_043747912), Alicyclobacillus kakegawensis (e.g. genbank accession number WP_067936067), Bacillus sp. V3-13 (e.g. genbank accession number WP_101661451), Lentisphaeria bacterium (e.g. from DCFZ01000012), Laceyella_sediminis (e.g. genbank accession number WP_106341859). In certain embodiments, the C2c1p is derived from a bacterial species selected from Alicyclobacillus acidoterrestris (e.g., ATCC 49025), Alicyclobacillus contaminans (e.g., DSM 17975).

[0532] In particular embodiments, the homologue or orthologue of C2c1 as referred to herein has a sequence homology or identity of at least 80%, more preferably at least 85%, even more preferably at least 90%, such as for instance at least 95% with C2c1. In further embodiments, the homologue or orthologue of C2c1 as referred to herein has a sequence identity of at least 80%, more preferably at least 85%, even more preferably at least 90%, such as for instance at least 95% with the wild type C2c1. Where the C2c1 has one or more mutations (mutated), the homologue or orthologue of said C2c1 as referred to herein has a sequence identity of at least 80%, more preferably at least 85%, even more preferably at least 90%, such as for instance at least 95% with the mutated C2c1.

[0533] In an embodiment, the C2c1 protein may be an ortholog of an organism of a genus which includes, but is not limited to Alicyclobacillus, Desulfovibrio, Desulfonatronum, Opitutaceae, Tuberibacillus, Bacillus, Brevibacillus, Candidatus, Desulfatirhabdium, Elusimicrobia, Citrobacter, Methylobacterium, Omnitrophicai, Phycisphaerae, Planctomycetes, Spirochaetes, Verrucomicrobiaceae, Lentisphaeria or Laceyella; in particular embodiments, the type V Cas protein may be an ortholog of an organism of a species which includes, but is not limited to Alicyclobacillus acidoterrestris (e.g., ATCC 49025), Alicyclobacillus contaminans (e.g., DSM 17975), Alicyclobacillus macrosporangiidus (e.g. DSM 17980), Bacillus hisashii strain C4, Candidatus Lindowbacteria bacterium RIFCSPLOWO2, Desulfovibrio inopinatus (e.g., DSM 10711), Desulfonatronum thiodismutans (e.g., strain MLF-1 or genbank accession number WP_031386437), Elusimicrobia bacterium RIFOXYA12, Omnitrophica WOR2 bacterium RIFCSPHIGHO2, Opitutaceae bacterium TAV5 or genbank accession number WP_009513281, Phycisphaerae bacterium ST-NAGAB-D1, Planctomycetes bacterium RBG_13_46_10, Spirochaetes bacterium GWB1_27_13, Verrucomicrobiaceae bacterium UBA2429, Tuberibacillus calidus (e.g., DSM 17572), Bacillus thermoamylovorans (e.g., strain B4166), Brevibacillus sp. CF112, Bacillus sp. NSP2.1, Desulfatirhabdium butyrativorans (e.g., DSM 18734 or genbank accession number WP_028326052), Alicyclobacillus herbarius (e.g., DSM 13609), Citrobacter freundii (e.g., ATCC 8090), Brevibacillus agri (e.g., BAB-2500), Methylobacterium nodulans (e.g., ORS 2060 or genbank accession number WP_043747912), Alicyclobacillus kakegawensis (e.g. genbank accession number WP_067936067), Bacillus sp. V3-13 (e.g. genbank accession number WP_101661451), Lentisphaeria bacterium (e.g. from DCFZ01000012), Laceyella sediminis (e.g. Genbank accession number WP_106341859), Bacillus sp. V3-13 (e.g. GenBank accession number WP_101661451). In particular embodiments, the homologue or orthologue of C2c1 as referred to herein has a sequence homology or identity of at least 80%, more preferably at least 85%, even more preferably at least 90%, such as for instance at least 95% with one or more of the C2c1 sequences disclosed herein. In further embodiments, the homologue or orthologue of C2c1 as referred to herein has a sequence identity of at least 80%, more preferably at least 85%, even more preferably at least 90%, such as for instance at least 95% with the wild type AacC2c1 or BthC2c1.

[0534] In particular embodiments, the C2c1 protein of the invention has a sequence homology or identity of at least 60%, more particularly at least 70, such as at least 80%, more preferably at least 85%, even more preferably at least 90%, such as for instance at least 95% with AacC2c1 or BthC2c1. In further embodiments, the C2c1 protein as referred to herein has a sequence identity of at least 60%, such as at least 70%, more particularly at least 80%, more preferably at least 85%, even more preferably at least 90%, such as for instance at least 95% with the wild type AacC2c1. In particular embodiments, the C2c1 protein of the present invention has less than 60% sequence identity with AacC2c1. The skilled person will understand that this includes truncated forms of the C2c1 protein whereby the sequence identity is determined over the length of the truncated form.

[0535] In certain example embodiments, a Cas12b ortholog may have an activity (e.g., nucleic acids (such as RNA or DNA) cleavage activity) at a temperature, e.g., about 25° C., about 26° C., about 27° C., about 28° C., about 29° C., about 30° C., about 31° C., about 32° C., about 33° C., about 34° C., about 35° C., about 36° C., about 37° C., about 38° C., about 39° C., about 40° C., about 41° C., about 42° C., about 43° C., about 44° C., about 45° C., about 46° C., about 47° C., about 48° C., about 49° C., or about 50° C. A given Cas12b orthologs may have its optimal activity at a range of temperature, e.g., from 30° C. to 50° C., from 30° C. to 48° C., from 37° C. to 42° C., or from 37° C. to 48° C. In some examples, BvCas12b may have an activity at about 37° C. In some examples, BhCas12b (e.g., variant 4 disclosed herein) may have an activity at about 37° C. In some examples, AkCas12b may have an activity at about 48° C. The activity may be the activity of the Cas12b ortholog in a eukaryotic cell. Alternatively or additionally, the activity may be the activity of the ortholog in a prokaryotic cell. In some cases, such an activity may be an optimal activity.

### Modified C2c1 Enzymes

[0536] In particular embodiments, it is of interest to make use of an engineered C2c1 protein as defined herein, such as C2c1, wherein the protein complexes with a nucleic acid molecule comprising RNA to form a CRISPR complex, wherein when in the CRISPR complex, the nucleic acid molecule targets one or more target polynucleotide loci, the protein comprises at least one modification compared to unmodified C2c1 protein, and wherein the CRISPR complex comprising the modified protein has altered activity as compared to the complex comprising the unmodified C2c1 protein. It is to be understood that when referring herein to CRISPR “protein”, the C2c1 protein preferably is a modified CRISPR enzyme (e.g. having increased or decreased (or no) enzymatic activity, such as without limitation including C2c1. The term “CRISPR protein” may be used interchangeably with “CRISPR enzyme”, irrespective of whether the CRISPR protein has altered, such as increased or decreased (or no) enzymatic activity, compared to the wild type CRISPR protein.

[0537] In addition to the mutations described above, the CRISPR-Cas protein may be additionally modified. As used herein, the term “modified” with regard to a CRISPR-Cas protein generally refers to a CRISPR-Cas protein having one or more modifications or mutations (including point mutations, truncations, insertions, deletions, chimeras, fusion proteins, etc.) compared to the wild type Cas protein from which it is derived. By derived is meant that the derived enzyme is largely based, in the sense of having a high degree of sequence homology with, a wildtype enzyme, but that it has been mutated (modified) in some way as known in the art or as described herein.

[0538] The additional modifications of the CRISPR-Cas protein may or may not cause an altered functionality. By means of example, and in particular with reference to CRISPR-Cas protein, modifications which do not result in an altered functionality include for instance codon optimization for expression into a particular host, or providing the nuclease with a particular marker (e.g. for visualization). Modifications with may result in altered functionality may also include mutations, including point mutations, insertions, deletions, truncations (including split nucleases), etc. Fusion proteins may without limitation include for instance fusions with heterologous domains or functional domains (e.g. localization signals, catalytic domains, etc.). In certain embodiments, various different modifications may be combined (e.g. a mutated nuclease which is catalytically inactive and which further is fused to a functional domain, such as for instance to induce DNA methylation or another nucleic acid modification, such as including without limitation a break (e.g. by a different nuclease (domain)), a mutation, a deletion, an insertion, a replacement, a ligation, a digestion, a break or a recombination). As used herein, “altered functionality” includes without limitation an altered specificity (e.g. altered target recognition, increased (e.g. “enhanced” Cas proteins) or decreased specificity, or altered PAM recognition), altered activity (e.g. increased or decreased catalytic activity, including catalytically inactive nucleases or nickases), and/or altered stability (e.g. fusions with destabilization domains). Suitable heterologous domains include without limitation a nuclease, a ligase, a repair protein, a methyltransferase, (viral) integrase, a recombinase, a transposase, an argonaute, a cytidine deaminase, a retron, a group II intron, a phosphatase, a phosphorylase, a sulpfurylase, a kinase, a polymerase, an exonuclease, etc. Examples of all these modifications are known in the art. It will be understood that a “modified” nuclease as referred to herein, and in particular a “modified” Cas or “modified” CRISPR-Cas system or complex preferably still has the capacity to interact with or bind to the polynucleic acid (e.g. in complex with the guide molecule). Such modified Cas protein can be combined with the deaminase protein or active domain thereof as described herein.

[0539] In certain embodiments, CRISPR-Cas protein may comprise one or more modifications resulting in enhanced activity and/or specificity, such as including mutating residues that stabilize the targeted or non-targeted strand (e.g. eCas9; “Rationally engineered Cas9 nucleases with improved specificity”, Slaymaker et al. (2016), Science, 351(6268):84-88, incorporated herewith in its entirety by reference). In certain embodiments, the altered or modified activity of the engineered CRISPR protein comprises increased targeting efficiency or decreased off-target binding. In certain embodiments, the altered activity of the engineered CRISPR protein comprises modified cleavage activity. In certain embodiments, the altered activity comprises increased cleavage activity as to the target polynucleotide loci. In certain embodiments, the altered activity comprises decreased cleavage activity as to the target polynucleotide loci. In certain embodiments, the altered activity comprises decreased cleavage activity as to off-target polynucleotide loci. In certain embodiments, the altered or modified activity of the modified nuclease comprises altered helicase kinetics. In certain embodiments, the modified nuclease comprises a modification that alters association of the protein with the nucleic acid molecule comprising RNA (in the case of a Cas protein), or a strand of the target polynucleotide loci, or a strand of off-target polynucleotide loci. In an aspect of the invention, the engineered CRISPR protein comprises a modification that alters formation of the CRISPR complex. In certain embodiments, the altered activity comprises increased cleavage activity as to off-target polynucleotide loci. Accordingly, in certain embodiments, there is increased specificity for target polynucleotide loci as compared to off-target polynucleotide loci. In other embodiments, there is reduced specificity for target polynucleotide loci as compared to off-target polynucleotide loci. In certain embodiments, the mutations result in decreased off-target effects (e.g. cleavage or binding properties, activity, or kinetics), such as in case for Cas proteins for instance resulting in a lower tolerance for mismatches between target and guide RNA. Other mutations may lead to increased off-target effects (e.g. cleavage or binding properties, activity, or kinetics). Other mutations may lead to increased or decreased on-target effects (e.g. cleavage or binding properties, activity, or kinetics). In certain embodiments, the mutations result in altered (e.g. increased or decreased) helicase activity, association or formation of the functional nuclease complex (e.g. CRISPR-Cas complex). In certain embodiments, as described above, the mutations result in an altered PAM recognition, i.e. a different PAM may be (in addition or in the alternative) be recognized, compared to the unmodified Cas protein. Particularly preferred mutations include positively charged residues and/or (evolutionary) conserved residues, such as conserved positively charged residues, in order to enhance specificity. In certain embodiments, such residues may be mutated to uncharged residues, such as alanine.

[0540] The crystal structure of C2c1 reveals similarity with another Type V Cas protein, Cpf1 (also known as Cas12a). Both C2c1 and Cpf1 consist of an α-helical recognition lobe (REC) and a nuclease lobe (NUC). The NUC lobe further contains a oligonucleotide-binding (WED/OBD) domain, a RuvC domain, a Nuc domain, and a bridge helix (BH), with structural shuffling and folding to form the intact 3D C2c1 structure (Liu et al. Mol. Cell 65, 310-322). Certain mutations (e.g. R1226A in AsCpf1, R894A in BvCas12b) in the Nuc domain render Cpf1 into a nickase for non-target strand cleavage. Mutations of the catalytic residues (e.g. mutations at D908, E933, D1263 of AsCpf1) in the RuvC domain abolishes catalytic activity of Cpf1 as a nuclease. Further, mutations in the PAM interaction (PI) domain of Cpf1 (e.g. mutations at S542, K548, N522, and K607 of AsCpf1), have been shown to alter Cpf1 specificities, potentially increasing or reducing off-target cleavage (See Gao et al. Cell Research (2016) 26, 901-913 (2016); Gao et al. Nature Biotechnology 35, 789-792 (2017)). The crystal structure of C2c1 also reveals that C2c1 lacks an identifiable PI domain; rather, it is suggested that C2c1 undergoes conformation adjustment to accommodate the binding of the PAM proximal double stranded DNA for PAM recognition and R-loop formation; C2c1 likely engages the WED/OBD and alpha helix domain to recognize the PAM duplex from both the major and the minor groove sides (Yang et al, Cell 167, 1814-1828 (2016)).

[0541] According to the invention, mutants can be generated which lead to inactivation of the enzyme or modify the double strand nuclease to nickase activity, or which alter the PAM recognition specificity of C2c1. In certain embodiments, this information is used to develop enzymes with reduced off-target effects.

[0542] In certain example embodiments, the editing preference is for a specific insert or deletion within the target region. In certain example embodiments, the at least one modification increases formation of one or more specific indels. In certain example embodiments, the at least one modification is in a C-terminal RuvC like domain, the NUC domain, the N-terminal alpha-helical region, the mixed alpha and beta region, or a combination thereof. In certain example embodiments the altered editing preference is indel formation. In certain example embodiments, the at least one modification increases formation of one or more specific insertions.

[0543] In certain example embodiments, the at least one modification increases formation of one or more specific insertions. In certain example embodiments, the at least one modification results in an insertion of an A adjacent to an A, T, G, or C in the target region. In another example embodiment, the at least one modification results in insertion of a T adjacent to an A, T, G, or C in the target region. In another example embodiment, the at least one modification results in insertion of a G adjacent to an A, T, G, or C in the target region. In another example embodiment, the at least one modification results in insertion of a C adjacent to an A, T, C, or G in the target region. The insertion may be 5′ or 3′ to the adjacent nucleotide. In one example embodiment, the one or more modification direct insertion of a T adjacent to an existing T. In certain example embodiments, the existing T corresponds to the 4th position in the binding region of a guide sequence. In certain example embodiments, the one or more modifications result in an enzyme which ensures more precise one-base insertions or deletions, such as those described above. More particularly, the one or more modifications may reduce the formations of other types of indels by the enzyme. The ability to generate one-base insertions or deletions can be of interest in a number of applications, such as correction of genetic mutants in diseases caused by small deletions, more particularly where HDR is not possible. For example, correction of the F508del mutation in CFTR via delivery of three sRNA directing insertion of three T's, which is the most common genotype of cystic fibrosis, or correction of Alia Jafar's single nucleotide deletion in CDKL5 in the brain. As the editing method only requires NHEJ, the editing would be possible in post-mitotic cells such as the brain. The ability to generate one base pair insertions/deletions may also be useful in genome-wide CRISPR-Cas negative selection screens. In certain example embodiments, the at least one modification, is a mutation. In certain other example embodiment, the one or more modification may be combined with one or more additional modifications or mutations described below including modifications to increase binding specificity and/or decrease off-target effects.

[0544] In certain example embodiments, the engineered CRISPR-cas effector comprising at least one modification that alters editing preference as compared to wild type may further comprise one or more additional modifications that alters the binding property as to the nucleic acid molecule comprising RNA or the target polypeptide loci, altering binding kinetics as to the nucleic acid molecule or target molecule or target polynucleotide or alters binding specificity as to the nucleic acid molecule. Example of such modifications are summarized in the following paragraph. Based on the above information, mutants can be generated which lead to inactivation of the enzyme or which modify the double strand nuclease to nickase activity. In alternative embodiments, this information is used to develop enzymes with reduced off-target effects.

### Modified Nickases

[0545] Mutations can also be made at neighboring residues at amino acids that participate in the nuclease activity. In some embodiments, only the RuvC domain is inactivated, and in other embodiments, another putative nuclease domain is inactivated, wherein the effector protein complex functions as a nickase and cleaves only one DNA strand. In some embodiments, two C2c1 variants (each a different nickase) are used to increase specificity, two nickase variants are used to cleave DNA at a target (where both nickases cleave a DNA strand, while minimizing or eliminating off-target modifications where only one DNA strand is cleaved and subsequently repaired). In preferred embodiments the C2c1 effector protein cleaves sequences associated with or at a target locus of interest as a homodimer comprising two C2c1 effector protein molecules. In a preferred embodiment the homodimer may comprise two C2c1 effector protein molecules comprising a different mutation in their respective RuvC domains.

[0546] The invention contemplates methods of using two or more nickases, in particular a dual or double nickase approach. In some aspects and embodiments, a single type C2c1 nickase may be delivered, for example a modified C2c1 or a modified C2c1 nickase as described herein. This results in the target DNA being bound by two C2c1 nickases. In addition, it is also envisaged that different orthologs may be used, e.g., an C2c1 nickase on one strand (e.g., the coding strand) of the DNA and an ortholog on the non-coding or opposite DNA strand. The ortholog can be, but is not limited to, a Cas9 nickase such as a SaCas9 nickase or a SpCas9 nickase. It may be advantageous to use two different orthologs that require different PAMs and may also have different guide requirements, thus allowing a greater deal of control for the user. In certain embodiments, DNA cleavage will involve at least four types of nickases, wherein each type is guided to a different sequence of target DNA, wherein each pair introduces a first nick into one DNA strand and the second introduces a nick into the second DNA strand. In such methods, at least two pairs of single stranded breaks are introduced into the target DNA wherein upon introduction of first and second pairs of single-strand breaks, target sequences between the first and second pairs of single-strand breaks are excised. In certain embodiments, one or both of the orthologs is controllable, i.e. inducible.

[0547] In certain methods according to the present invention, the CRISPR-Cas protein is preferably mutated with respect to a corresponding wild-type enzyme such that the mutated CRISPR-Cas protein lacks the ability to cleave one or both DNA strands of a target locus containing a target sequence. In particular embodiments, one or more catalytic domains of the C2c1 protein are mutated to produce a mutated Cas protein which cleaves only one DNA strand of a target sequence.

[0548] In certain embodiments of the methods provided herein the CRISPR-Cas protein is a mutated CRISPR-Cas protein which cleaves only one DNA strand, i.e. a nickase. More particularly, in the context of the present invention, the nickase ensures cleavage within the non-target sequence, i.e. the sequence which is on the opposite DNA strand of the target sequence and which is 3′ of the PAM sequence. By means of further guidance, and without limitation, an arginine-to-alanine substitution (R911A) in the Nuc domain of C2c1 from Alicyclobacillus acidoterrestris converts C2c1 from a nuclease that cleaves both strands to a nickase (cleaves a single strand). It will be understood by the skilled person that where the enzyme is not AacC2c1, a mutation may be made at a residue in a corresponding position.

[0549] In certain embodiments, the C2c1 protein is a C2c1 nickase which comprises a mutation in the Nuc domain. In some embodiments, the C2c1 nickase comprises a mutation corresponding to amino acid positions R911, R1000, or R1015 in Alicyclobacillus acidoterrestris C2c1. In some embodiments, the C2c1 nickase comprises a mutation corresponding to R911A, R1000A, or R1015A in Alicyclobacillus acidoterrestris C2c1. In some embodiments, the C2c1 nickase comprises a mutation corresponding to R894A in Bacillus sp. V3-13 C2c1. In certain embodiments, the C2c1 protein recognizes PAMs with increased or decreased specificity as compared with an unmutated or unmodified form of the protein. In some embodiments, the C2c1 protein recognizes altered PAMs as compared with an unmutated or unmodified form of the protein.

### Deactivated/Inactivated C2c1 Protein

[0550] Where the C2c1 protein has nuclease activity, the protein may be modified to have diminished nuclease activity e.g., nuclease inactivation of at least 70%, at least 80%, at least 90%, at least 95%, at least 97%, or 100% as compared with the wild type enzyme; or to put in another way, a C2c1 enzyme having advantageously about 0% of the nuclease activity of the non-mutated or wild type C2c1 enzyme or CRISPR enzyme, or no more than about 3% or about 5% or about 10% of the nuclease activity of the non-mutated or wild type C2c1 enzyme. In some embodiments, a CRISPR-Cas protein is considered to substantially lack all DNA cleavage activity when the DNA cleavage activity of the mutated enzyme is about no more than 25%, 10%, 5%, 1%, 0.1%, 0.01%, or less of the DNA cleavage activity of the non-mutated form of the enzyme; an example can be when the DNA cleavage activity of the mutated form is nil or negligible as compared with the non-mutated form. In these embodiments, the CRISPR-Cas protein is used as a generic DNA binding protein. This is possible by introducing mutations into the nuclease domains of the C2c1 and orthologs thereof.

[0551] In certain embodiments, the CRISPR enzyme is engineered and can comprise one or more mutations that reduce or eliminate a nuclease activity.

[0552] In certain embodiments, the C2c1 protein is a catalytically inactive C2c1 which comprises a mutation in the RuvC domain. In some embodiments, the catalytically inactive C2c1 protein comprises a mutation corresponding to amino acid positions D570, E848, or D977 in Alicyclobacillus acidoterrestris C2c1. In some embodiments, the catalytically inactive C2c1 protein comprises a mutation corresponding to D570A, E848A, or D977A in Alicyclobacillus acidoterrestris C2c1.

[0553] In some embodiments, the catalytically inactive C2c1 protein comprises a mutation corresponding to amino acid positions D574, E828, or D952 in Bacillus hisashii C2c1. In some embodiments, the catalytically inactive C2c1 protein comprises a mutation corresponding to D574A, E828A, or D952A in Bacillus hisashii C2c1.

[0554] In some embodiments, the catalytically inactive C2c1 protein comprises a mutation corresponding to amino acid positions D567, E831, or D963 in Bacillus sp. V3-13 C2c1. In some embodiments, the catalytically inactive C2c1 protein comprises a mutation corresponding to D567A, E831A, or D963A in Bacillus sp. V3-13 C2c1.

[0555] In certain embodiments, the C2c1 protein is a catalytically inactive C2c1 which comprises a mutation in the RuvC domain. In some embodiments, the catalytically inactive C2c1 protein comprises a mutation corresponding to amino acid positions D570, E848, or D977 in Alicyclobacillus acidoterrestris C2c1. In some embodiments, the catalytically inactive C2c1 protein comprises a mutation corresponding to D570A, E848A, or D977A in Alicyclobacillus acidoterrestris C2c1.

[0556] In some embodiments, the catalytically inactive C2c1 protein comprises a mutation corresponding to amino acid positions D574, E828, or D952 in Bacillus hisashii C2c1. In some embodiments, the catalytically inactive C2c1 protein comprises a mutation corresponding to D574A, E828A, or D952A in Bacillus hisashii C2c1.

[0557] In some embodiments, the catalytically inactive C2c1 protein comprises a mutation corresponding to amino acid positions D567, E831, or D963 in Bacillus sp. V3-13 C2c1. In some embodiments, the catalytically inactive C2c1 protein comprises a mutation corresponding to D567A, E831A, or D963A in Bacillus sp. V3-13 C2c1.

[0558] In certain embodiments, the C2c1 protein is a C2c1 nickase which comprises a mutation in the Nuc domain. In some embodiments, the C2c1 nickase comprises a mutation corresponding to amino acid positions R911, R1000, or R1015 in Alicyclobacillus acidoterrestris C2c1. In some embodiments, the C2c1 nickase comprises a mutation corresponding to R911A, R1000A, or R1015A in Alicyclobacillus acidoterrestris C2c1. In some embodiments, the C2c1 nickase comprises a mutation corresponding to R894A in Bacillus sp. V3-13 C2c1. In certain embodiments, the C2c1 protein recognizes PAMs with increased or decreased specificity as compared with an unmutated or unmodified form of the protein. In some embodiments, the C2c1 protein recognizes altered PAMs as compared with an unmutated or unmodified form of the protein.

[0559] In some embodiments, a CRISPR-Cas protein is considered to substantially lack all DNA cleavage activity when the DNA cleavage activity of the mutated enzyme is about no more than 25%, 10%, 5%, 1%, 0.1%, 0.01%, or less of the DNA cleavage activity of the non-mutated form of the enzyme; an example can be when the DNA cleavage activity of the mutated form is nil or negligible as compared with the non-mutated form. In these embodiments, the CRISPR-Cas protein is used as a generic DNA binding protein. The mutations may be artificially introduced mutations or gain- or loss-of-function mutations.

[0560] In addition to the mutations described above, the CRISPR-Cas protein may be additionally modified. As used herein, the term “modified” with regard to a CRISPR-Cas protein generally refers to a CRISPR-Cas protein having one or more modifications or mutations (including point mutations, truncations, insertions, deletions, chimeras, fusion proteins, etc.) compared to the wild type Cas protein from which it is derived. By derived is meant that the derived enzyme is largely based, in the sense of having a high degree of sequence homology with, a wildtype enzyme, but that it has been mutated (modified) in some way as known in the art or as described herein.

[0561] The inactivated C2c1 CRISPR enzyme may have associated (e.g., via fusion protein or suitable linkers) one or more functional domains, including for example, one or more domains from the group comprising, consisting essentially of, or consisting of deaminase activity, methylase activity, demethylase activity, transcription activation activity, transcription repression activity, transcription release factor activity, histone modification activity, RNA cleavage activity, DNA cleavage activity, nucleic acid binding activity, and molecular switches (e.g., light inducible). Suitable linkers for use in the methods of the present invention are well known to those of skill in the art and include, but are not limited to, straight or branched-chain carbon linkers, heterocyclic carbon linkers, or peptide linkers. However, as used herein the linker may also be a covalent bond (carbon-carbon bond or carbon-heteroatom bond). In particular embodiments, the linker is used to separate the targeting domain and the adenosine deaminase by a distance sufficient to ensure that each protein retains its required functional property. Preferred peptide linker sequences adopt a flexible extended conformation and do not exhibit a propensity for developing an ordered secondary structure. In certain embodiments, the linker can be a chemical moiety which can be monomeric, dimeric, multimeric or polymeric. Preferably, the linker comprises amino acids. Typical amino acids in flexible linkers include Gly, Asn and Ser. Accordingly, in particular embodiments, the linker comprises a combination of one or more of Gly, Asn and Ser amino acids. Other near neutral amino acids, such as Thr and Ala, also may be used in the linker sequence. Exemplary linkers are disclosed in Maratea et al. (1985), Gene 40: 39-46; Murphy et al. (1986) Proc. Nat'l. Acad. Sci. USA 83: 8258-62; U.S. Pat. Nos. 4,935,233; and 4,751,180. For example, GlySer linkers GGS, GGGS (SEQ ID NO:402) or GSG can be used. GGS, GSG, GGGS or GGGGS (SEQ ID NO:403) linkers can be used in repeats of 3 (such as (GGS)3 (SEQ ID NO:404), (GGGGS)3 (SEQ ID NO:393) or 5 (SEQ ID NO:405), 6 (SEQ ID NO:394), 7 (SEQ ID NO:406), 9 (SEQ ID NO:395) or even 12 (SEQ ID NO:396) or more, to provide suitable lengths. In particular embodiments, linkers such as (GGGGS)3 are preferably used herein. (GGGGS)6 (GGGGS)9 or (GGGGS)12 may preferably be used as alternatives. Other preferred alternatives are (GGGGS)1 (SEQ ID NO:403), (GGGGS)2 (SEQ ID NO:407), (GGGGS)4 (SEQ ID NO:408), (GGGGS)5 (SEQ ID NO:405), (GGGGS)7 (SEQ ID NO:406), (GGGGS)8 (SEQ ID NO:409), (GGGGS)10 (SEQ ID NO:410), or (GGGGS)11 (SEQ ID NO:411). In yet a further embodiment, LEPGEKPYKCPECGKSFSQSGALTRHQRTHTR (SEQ ID NO:412) is used as a linker. In yet an additional embodiment, the linker is XTEN linker. In addition, N- and C-terminal NLSs can also function as linker (e.g., PKKKRKVEASSPKKRKVEAS (SEQ ID NO:413).

[0562] Examples of linkers are shown in the table below.

| | |
|---|---|
| GGS | GGTGGTAGT (SEQ ID NO: 414) |
| GGSx3 (9) | GGTGGTAGTGGAGGGAGCGGCGGT |
| | TCA (SEQ ID NO: 415) |
| GGSx7 (21) | ggtggaggaggctctggtggaggcg |
| | gtagcggaggcggagggtcgGGTG |
| | GTAGTGGAGGGAGCGGCGGTTCA |
| | (SEQ ID NO: 416) |
| XTEN | TCGGGATCTGAGACGCCTGGGACCT |
| | CGGAATCGGCTACGCCCGAA |
| | AGT (SEQ ID NO: 417) |
| Z-EGFR_Short | Gtggataacaaatttaacaaagaaat |
| | gtgggcggcgtgggaagaaattcgta |
| | acctgccgaacctgaacggctggcag |
| | atgaccgcgtttattgcgagcctggt |
| | ggatgatccgagccagagcgcgaacc |
| | tgctggcggaagcgaaaaaactgaac |
| | gatgcgcaggcgccgaaaaccggcgg |
| | tggttctggt |
| | (SEQ ID NO: 418) |
| GSAT | Ggtggttctgccggtggctccggttc |
| | tggctccagcggtggcagctctggtg |
| | cgtccggcacgggtactgcgggtggc |
| | actggcagcggttccggtactggctc |
| | tggc (SEQ ID NO: 419) |

[0563] Exemplary functional domains are adenosine deaminase domain containing (ADAD) family members, Fok1, VP64, P65, HSF1, MyoD1. In the event that deaminase is provided, it is advantageous that a guide sequence is designed to introduce one or more mismatches in an RNA duplex or a RNA/DNA heteroduplex formed between the guide sequence and the target sequence. In particular embodiments, the duplex between the guide sequence and the target sequence comprises a A-C mismatch. In the event that Fok1 is provided, it is advantageous that multiple Fok1 functional domains are provided to allow for a functional dimer and that gRNAs are designed to provide proper spacing for functional use (Fok1) as specifically described in Tsai et al. Nature Biotechnology, Vol. 32, Number 6, June 2014). The adaptor protein may utilize known linkers to attach such functional domains. In some cases, it is advantageous that additionally at least one NLS is provided. In some instances, it is advantageous to position the NLS at the N terminus. When more than one functional domain is included, the functional domains may be the same or different.

[0564] In general, the positioning of the one or more functional domain on the inactivated C2c1 enzyme is one which allows for correct spatial orientation for the functional domain to affect the target with the attributed functional effect. For example, if the functional domain is a transcription activator (e.g., VP64 or p65), the transcription activator is placed in a spatial orientation which allows it to affect the transcription of the target. Likewise, a transcription repressor will be advantageously positioned to affect the transcription of the target, and a nuclease (e.g., Fok1) will be advantageously positioned to cleave or partially cleave the target. This may include positions other than the N-/C-terminus of the CRISPR enzyme. The functional domain modifies transcription or translation of the target DNA sequence.

[0565] In some embodiments, the Cas12b effector protein is associated with one or more functional domains; and the Cas12b effector protein contains one or more mutations within a RuvC and/or Nuc domain, whereby the formed CRISPR complex is capable of delivering an epigenetic modifier or a transcriptional or translational activation or repression signal.

[0566] In certain embodiments, the CRISPR-Cas system disclosed herein is a self-inactivating system and the Cas effector protein is transiently expressed. In some embodiments, the self-inactivating system comprises a viral vector such as an AAV vector. In some embodiments, the self-inactivating system comprises DNA sequences that share 80%, 81%, 82%, 83%, 84%, 85%, 86%, 97%, 88%, 89%, 90%, 91%, 92%, 93%, 94%, 95%, 96%, 97%, 98%, 99%, 100% of identity with the endogenous target sequence. In some embodiments, the self-inactivating system comprises two or more vector systems. In some embodiments, the self-inactivating system comprises a single vector. In some embodiments, the self-inactivating system comprises a Cas effector protein that simultaneously targets the endogenous DNA target sequence and the vector sequence that encodes the Cas effector protein. In some embodiments, the self-inactivating system comprises a Cas effector protein that targets the endogenous DNA target sequence and the vector sequence that encodes the Cas effector protein sequentially. In some embodiments, the nucleotide encoding the Cas effector and the guide sequence are operably linked to separate regulatory elements on a single vector. In some embodiments, the nucleotide encoding the Cas effector and the guide sequence are operably linked to separate regulatory elements on separate vectors. In some embodiments, the regulatory elements are constitutive. In some embodiments, the regulatory elements are inducible.

### Destabilized C2c1

[0567] In certain embodiments, the effector protein (CRISPR enzyme; C2c1) according to the invention as described herein is associated with or fused to a destabilization domain (DD). In some embodiments, the DD is ER50. A corresponding stabilizing ligand for this DD is, in some embodiments, 4HT. As such, in some embodiments, one of the at least one DDs is ER50 and a stabilizing ligand therefor is 4HT or CMP8. In some embodiments, the DD is DHFR50. A corresponding stabilizing ligand for this DD is, in some embodiments, TMP. As such, in some embodiments, one of the at least one DDs is DHFR50 and a stabilizing ligand therefor is TMP. In some embodiments, the DD is ER50. A corresponding stabilizing ligand for this DD is, in some embodiments, CMP8. CMP8 may therefore be an alternative stabilizing ligand to 4HT in the ER50 system. While it may be possible that CMP8 and 4HT can/should be used in a competitive matter, some cell types may be more susceptible to one or the other of these two ligands, and from this disclosure and the knowledge in the art the skilled person can use CMP8 and/or 4HT.

[0568] In some embodiments, one or two DDs may be fused to the N-terminal end of the CRISPR enzyme with one or two DDs fused to the C-terminal of the CRISPR enzyme. In some embodiments, the at least two DDs are associated with the CRISPR enzyme and the DDs are the same DD, i.e. the DDs are homologous. Thus, both (or two or more) of the DDs could be ER50 DDs. This is preferred in some embodiments. Alternatively, both (or two or more) of the DDs could be DHFR50 DDs. This is also preferred in some embodiments. In some embodiments, the at least two DDs are associated with the CRISPR enzyme and the DDs are different DDs, i.e. the DDs are heterologous. Thus, one of the DDS could be ER50 while one or more of the DDs or any other DDs could be DHFR50. Having two or more DDs which are heterologous may be advantageous as it would provide a greater level of degradation control. A tandem fusion of more than one DD at the N or C-term may enhance degradation; and such a tandem fusion can be, for example ER50-ER50-C2c1. It is envisaged that high levels of degradation would occur in the absence of either stabilizing ligand, intermediate levels of degradation would occur in the absence of one stabilizing ligand and the presence of the other (or another) stabilizing ligand, while low levels of degradation would occur in the presence of both (or two of more) of the stabilizing ligands. Control may also be imparted by having an N-terminal ER50 DD and a C-terminal DHFR50 DD.

[0569] In some embodiments, the fusion of the CRISPR enzyme with the DD comprises a linker between the DD and the CRISPR enzyme. In some embodiments, the linker is a GlySer linker. In some embodiments, the DD-CRISPR enzyme further comprises at least one Nuclear Export Signal (NES). In some embodiments, the DD-CRISPR enzyme comprises two or more NESs. In some embodiments, the DD-CRISPR enzyme comprises at least one Nuclear Localization Signal (NLS). This may be in addition to an NES. In some embodiments, the CRISPR enzyme comprises or consists essentially of or consists of a localization (nuclear import or export) signal as, or as part of, the linker between the CRISPR enzyme and the DD. HA or Flag tags are also within the ambit of the invention as linkers. Applicants use NLS and/or NES as linker and also use Glycine Serine linkers as short as GS up to (GGGGS)3.

[0570] Destabilizing domains have general utility to confer instability to a wide range of proteins; see, e.g., Miyazaki, J Am Chem Soc. Mar. 7, 2012; 134(9): 3942-3945, incorporated herein by reference. CMP8 or 4-hydroxytamoxifen can be destabilizing domains. More generally, A temperature-sensitive mutant of mammalian DHFR (DHFRts), a destabilizing residue by the N-end rule, was found to be stable at a permissive temperature but unstable at 37° C. The addition of methotrexate, a high-affinity ligand for mammalian DHFR, to cells expressing DHFRts inhibited degradation of the protein partially. This was an important demonstration that a small molecule ligand can stabilize a protein otherwise targeted for degradation in cells. A rapamycin derivative was used to stabilize an unstable mutant of the FRB domain of mTOR (FRB*) and restore the function of the fused kinase, GSK-3β.6,7 This system demonstrated that ligand-dependent stability represented an attractive strategy to regulate the function of a specific protein in a complex biological environment. A system to control protein activity can involve the DD becoming functional when the ubiquitin complementation occurs by rapamycin induced dimerization of FK506-binding protein and FKBP12. Mutants of human FKBP12 or ecDHFR protein can be engineered to be metabolically unstable in the absence of their high-affinity ligands, Shield-1 or trimethoprim (TMP), respectively. These mutants are some of the possible destabilizing domains (DDs) useful in the practice of the invention and instability of a DD as a fusion with a CRISPR enzyme confers to the CRISPR protein degradation of the entire fusion protein by the proteasome. Shield-1 and TMP bind to and stabilize the DD in a dose-dependent manner. The estrogen receptor ligand binding domain (ERLBD, residues 305-549 of ERS1) can also be engineered as a destabilizing domain. Since the estrogen receptor signaling pathway is involved in a variety of diseases such as breast cancer, the pathway has been widely studied and numerous agonist and antagonists of estrogen receptor have been developed. Thus, compatible pairs of ERLBD and drugs are known. There are ligands that bind to mutant but not wild-type forms of the ERLBD. By using one of these mutant domains encoding three mutations (L384M, M421G, G521R)12, it is possible to regulate the stability of an ERLBD-derived DD using a ligand that does not perturb endogenous estrogen-sensitive networks. An additional mutation (Y537S) can be introduced to further destabilize the ERLBD and to configure it as a potential DD candidate. This tetra-mutant is an advantageous DD development. The mutant ERLBD can be fused to a CRISPR enzyme and its stability can be regulated or perturbed using a ligand, whereby the CRISPR enzyme has a DD. Another DD can be a 12-kDa (107-amino-acid) tag based on a mutated FKBP protein, stabilized by Shield1 ligand; see, e.g., Nature Methods 5, (2008). For instance a DD can be a modified FK506 binding protein 12 (FKBP12) that binds to and is reversibly stabilized by a synthetic, biologically inert small molecule, Shield-1; see, e.g., Banaszynski L A, Chen L C, Maynard-Smith L A, Ooi A G, Wandless T J. A rapid, reversible, and tunable method to regulate protein function in living cells using synthetic small molecules. Cell. 2006; 126:995-1004; Banaszynski L A, Sellmyer M A, Contag C H, Wandless T J, Thorne S H. Chemical control of protein stability and function in living mice. Nat Med. 2008; 14:1123-1127; Maynard-Smith L A, Chen L C, Banaszynski L A, Ooi A G, Wandless T J. A directed approach for engineering conditional protein stability using biologically silent small molecules. The Journal of biological chemistry. 2007; 282:24866-24872; and Rodriguez, Chem Biol. Mar. 23, 2012; 19(3): 391-398—all of which are incorporated herein by reference and may be employed in the practice of the invention in selected a DD to associate with a CRISPR enzyme in the practice of this invention. As can be seen, the knowledge in the art includes a number of DDs, and the DD can be associated with, e.g., fused to, advantageously with a linker, to a CRISPR enzyme, whereby the DD can be stabilized in the presence of a ligand and when there is the absence thereof the DD can become destabilized, whereby the CRISPR enzyme is entirely destabilized, or the DD can be stabilized in the absence of a ligand and when the ligand is present the DD can become destabilized; the DD allows the CRISPR enzyme and hence the CRISPR-Cas complex or system to be regulated or controlled-turned on or off so to speak, to thereby provide means for regulation or control of the system, e.g., in an in vivo or in vitro environment. For instance, when a protein of interest is expressed as a fusion with the DD tag, it is destabilized and rapidly degraded in the cell, e.g., by proteasomes. Thus, absence of stabilizing ligand leads to a D associated Cas being degraded. When a new DD is fused to a protein of interest, its instability is conferred to the protein of interest, resulting in the rapid degradation of the entire fusion protein. Peak activity for Cas is sometimes beneficial to reduce off-target effects. Thus, short bursts of high activity are preferred. The present invention is able to provide such peaks. In some senses the system is inducible. In some other senses, the system repressed in the absence of stabilizing ligand and de-repressed in the presence of stabilizing ligand.

### Split Designs

[0571] C2c1 is also capable of is capable of robust nucleic acid detection. In certain embodiments, C2c1 is converted to an nucleic acid binding protein (“dead C2c1; dC2c1) by inactivation of its nuclease activity. When converted to a nucleic acid binding protein, C2c1 is useful for localizing other functional components to target nucleic acids in a sequence dependent manner. The components can be natural or synthetic. According to the invention dC2c1 is used to (i) bring effector modules to specific nucleic acids to modulate the function or transcription, which could be used for large-scale screening, construction of synthetic regulatory circuits and other purposes; (ii) fluorescently tag specific nucleic acids to visualize their trafficking and/or localization; (iii) alter nucleic acid localization through domains with affinity for specific subcellular compartments; and (iv) capture specific nucleic acids (through direct pull down of dC2c2 or use of dC2c2 to localize biotin ligase activity) to enrich for proximal molecular partners, including RNAs and proteins. dC2c1 can be used to i) organize components of a cell, ii) switch components or activities of a cell on or off, and iii) control cellular states based on the presence or amount of a specific transcript present in a cell. In exemplary embodiments, the invention provides split enzymes and reporter molecules, portions of which are provided in hybrid molecules comprising an nucleic acid-binding CRISPR effector, such as, but not limited to C2c1. When brought into proximity in the presence of a nucleic acid in a cell, activity of the split reporter or enzyme is reconstituted and the activity can then be measured. A split enzyme reconstituted in such manner can detectably act on a cellular component and/or pathway, including but not limited to an endogenous component or pathway, or exogenous component or pathway. A split reporter reconstituted in such manner can provide a detectable signal, such as but not limited to fluorescent or other detectable moiety. In certain embodiments, a split proteolytic enzyme is provided which when reconstituted acts on one or more components (endogenous or exogenous) in a detectable manner. In one exemplary embodiment, there is provided a method of inducing programmed cell death upon detection of a nucleic acid species in a cell. It will be apparent how such a method could be used to ablate populations of cells, based for example, on the presence of virus in the cells.

[0572] According to the invention, there is provided a method of inducing cell death in a cell which contains an nucleic acid of interest, which comprises contacting the nucleic acid in the cell with a composition which comprises a first CRIPSR protein linked to an inactive first portion of a proteolytic enzyme capable of inducing cell death, a second CRISPR protein linked to the complementary portion of the enzyme wherein the enzyme activity of the proteolytic enzyme is reconstituted when the first portion and the complementary portion of the protein are contacted, and a first guide that binds to the first CRISPR protein and hybridizes to a first target sequence of the nucleic acid, and a second guide that binds to the second CRISPR protein and hybridizes to a second target sequence of the nucleic acid. When the target nucleic acid of interest is present, the first and second portions of the proteolytic enzyme are contacted and the proteolytic activity of the enzyme is reconstituted and induces cell death. In one such embodiment of the invention, the proteolytic enzyme is a caspase. In another such embodiment, the proteolytic enzyme is TEV protease, wherein when the proteolytic activity of the TEV protease is reconstituted, a TEV protease substrate is cleaved and/or activated. In an embodiment of the invention, the TEV protease substrate is an engineered procaspase such that when the TEV protease is reconstituted, the procaspase is cleaved and activated, whereby apoptosis occurs. In an embodiment of the invention, a proteolytically cleavable transcription factor can be combined with any downstream reporter gene of choice to yield ‘transcription-coupled’ reporter systems. In an embodiment, a split protease is used to cleave or expose a degron from a detectable substrate.

[0573] According to the invention, there is provided a method of marking or identifying a cell which contains an nucleic acid of interest, which comprises contacting the nucleic acid in the cell with a composition which comprises a first CRIPSR protein linked to an inactive first portion of a proteolytic enzyme, a second CRISPR protein linked to the complementary portion of the enzyme wherein the enzyme activity of the proteolytic enzyme is reconstituted when the first portion and the complementary portion of the protein are contacted, a first guide that binds to the first CRISPR protein and hybridizes to a first target sequence of the nucleic acid, a second guide that binds to the second CRISPR protein and hybridizes to a second target sequence of the nucleic acid, and an indicator which is detectably cleaved by the reconstituted proteolytic enzyme. The first and second portions of the proteolytic enzyme are contacted when the nucleic acid of interest is present in the cell, whereby the activity of the proteolytic enzyme is reconstituted and the indicator is detectably cleaved. In one such embodiment, the detectable indicator is a fluorescent protein, such as, but not limited to green fluorescent protein. In another such embodiment of the invention, the detectable indicator is a luminescent protein, such as, but not limited to luciferase. In an embodiment, the split reporter is based on reconstitution of split fragments of Renilla reniformis luciferase (Rluc). In an embodiment of the invention, the split reporter is based on complementation between two nonfluorescent fragments of the yellow fluorescent protein (YFP).

### Transcription and Modulation

[0574] In one aspect, the invention provides a method of identifying, measuring, and/or modulating the state of a cell or tissue based on the presence or level of a particular nucleic acid in the cell or tissue. In one embodiment, the invention provides a CRISPR-based control system designed to modulate the presence and/or activity of a cellular system or component, which may be a natural or synthetic system or component, based on the presence of a selected nucleic acid species of interest. In general, the control system features an inactivated protein, enzyme or activity that is reconstituted when a selected nucleic acid species of interest is present. In an embodiment of the invention, reconstituting an inactivated protein, enzyme or activity involves bringing together inactive components to assemble an active complex.

### Split Apoptosis Constructs

[0575] It is often desirable to deplete or kill cells based on the presence of aberrant endogenous or foreign DNA, either for basic biology applications to study the role of specific cells types or for therapeutic applications such as cancer or infected cell clearance (Baker, D. J., Childs, B. G., Durik, M., Wijers, M. E., Sieben, C. J., Zhong, J., Saltness, R. A., Jeganathan, K. B., Verzosa, G. C., Pezeshki, A., et al. (2016). Naturally occurring p16(Ink4a)-positive cells shorten healthy lifespan. Nature 530, 184-189.). This targeted cell killing can be achieved by fusing split apoptotic domains to C2c1 proteins, which upon binding to the DNA are reconstituted, leading to death of cells specifically expressing targeted genes or sets of genes. In certain embodiments, the apoptotic domains may be split Caspase 3 (Chelur, D. S., and Chalfie, M. (2007). Targeted cell killing by reconstituted caspases. Proc. Natl. Acad. Sci. U.S.A. 104, 2283-2288.). Other possibilities are the assembly of Caspases, such as bringing two Caspase 8 (Pajvani, U. B., Trujillo, M. E., Combs, T. P., Iyengar, P., Jelicks, L., Roth, K. A., Kitsis, R. N., and Scherer, P. E. (2005). Fat apoptosis through targeted activation of caspase 8: a new mouse model of inducible and reversible lipoatrophy. Nat. Med. 11, 797-803.) or Caspase 9 (Straathof, K. C., Pule, M. A., Yotnda, P., Dotti, G., Vanin, E. F., Brenner, M. K., Heslop, H. E., Spencer, D. M., and Rooney, C. M. (2005). An inducible caspase 9 safety switch for T-cell therapy. Blood 105, 4247-4254.) effectors in proximity via C2c1 binding. It is also possible to reconstitute a split TEV (Gray, D. C., Mahrus, S., and Wells, J. A. (2010). Activation of specific apoptotic caspases with an engineered small-molecule-activated protease. Cell 142, 637-646.) via C2c1 binding on a transcript. This split TEV can be used in a variety of readouts, including luminescent and fluorescent readouts (Wehr, M. C., Laage, R., Bolz, U., Fischer, T. M., Grunewald, S., Scheek, S., Bach, A., Nave, K.-A., and Rossner, M. J. (2006). Monitoring regulated protein-protein interactions using split TEV. Nat. Methods 3, 985-993.). One embodiment involves the reconstitution of this split TEV to cleave modified pro-caspase 3 or pro-caspase 7 (Gray, D. C., Mahrus, S., and Wells, J. A. (2010). Activation of specific apoptotic caspases with an engineered small-molecule-activated protease. Cell 142, 637-646), resulting in cell death.

[0576] Inducible apoptosis. According to the invention, guides can be used to locate C2c1 complexes bearing functional domains to induce apoptosis. The C2c1 can be any ortholog. In one embodiment, functional domains are fused at the C-terminus of the protein. The C2c1 is catalytically inactive for example via mutations that knock out nuclease activity. The adaptability of system can be demonstrated by employing various methods of caspase activation, and optimization of guide spacing along a target nucleic acid. Caspase 8 and caspase 9 (aka “initiator” caspases) activity can be induced using C2c1 complex formation to bring together caspase 8 or caspase 9 enzymes associated with C2c1. Alternatively, caspase 3 and caspase 7 (aka “effector” caspases) activity can be induced when C2c1 complexes bearing tobacco etch virus (TEV)N-terminal and C-terminal portions (“snipper”) are maintained in proximity, activating the TEV protease activity and leading to cleavage and activation of caspase 3 or caspase 7 pro-proteins. The system can employ split caspase 3, with heterodimerization of the caspase 3 portions by attachment to C2c1 complexes bound to a target nucleic acid. Exemplary apoptotic components are set forth in Table 3 below.

TABLE 3
Apoptotic Components

| | | |
|---|---|---|
| iCasp9 | GFGDVGALESLRGNADLAYI | Straathof, K.C., |
| (SEQ ID | LSMEPCGHCLIINNVNFCRE | et al. (2005) |
| NO: 420) | SGLRTRTGSNIDCEKLRRRF | Blood 105, |
| | SSLHFMVEVKGDLTAKKMVL | 4247-4254 |
| | ALLELARQDHGALDCCVVVI | |
| | LSHGCQASHLQFPGAVYGTD | |
| | GCPVSVEKIVNIFNGTSCPS | |
| | LGGKPKLFFIQACGGEQKDH | |
| | GFEVASTSPEDESPGSNPEP | |
| | DATPFQEGLRTFDQLDAISS | |
| | LPTPSDIFVSYSTFPGFVSW | |
| | RDPKSGSWYVETLDDIFEQW | |
| | AHSEDLQSLLLRVANAVSVK | |
| | GIYKQMPGCFNFLRKKLFFK | |
| | TSVD | |
| Caspase 8 | SESQTLDKVYQMKSKPRGYC | Pajvani, U.B., et |
| (SEQ ID | LIINNFINFAKAREKVPKLH | al. (2005). Nat. |
| NO: 421) | SIRDRNGTHLDAGALTTTFE | Med. 11, 797- |
| | ELHFEIKPHDDCTVEQIYEI | 803 |
| | LKIYQLMDHSNMDCFICCIL | |
| | SHGDKGIIYGTDGQEAPIYE | |
| | LTSQFTGLKCPSLAGKPKVF | |
| | FIQACQGDNYQKGIPVETDS | |
| | EEQPYLEMDLSSPQTRYIPD | |
| | EADFLLGMATVNNCVSYRNP | |
| | AEGTWYIQSLCQSLRERCPR | |
| | GDDILTILTEVNYEVSNKDD | |
| | KKNMGKQMPQPTFTLRKKLV | |
| | FPSD | |
| Split | SGVDDDMACHKIPVEADFLY | Chelur, D.S., and |
| caspase 3 | AYSTAPGYYSWRNSKDGSWF | Chalfie, M. |
| (p12) | IQSLCAMLKQYADKLEFMHI | (2007). Proc. |
| (SEQ ID | LTRVNRKVATEFESFSFDAT | Natl. Acad. Sci. |
| NO: 663) | FHAKKQIPCIVSMLTKELYF | U.S.A. 104, |
| | YH | 2283-2288 |
| Split | SGISLDNSYKMDYPEMGLCII | Chelur, D.S., and |
| caspase 3 | INNKNFHKSTGMTSRSGTDVD | Chalfie, M. |
| (p17) | AANLRETFRNLKYEVRNKNDL | (2007). Proc. |
| (SEQ ID | TREEIVELMRDVSKEDHSKRS | Natl. Acad. Sci. |
| NO: 422) | SFVCVLLSHGEEGIIFGTNGP | U.S.A. 104, |
| | VDLKKITNFFRGDRCRSLTGK | 2283-2288 |
| | PKLFIIQACRGTELDCGIETD | |
| SNIPPER | GESLFKGPRDYNPISSTICHL | Gray, D C., |
| N-TEV | TNESDGHTTSLYGIGFGPFII | et al. |
| (SEQ ID | TNKHLFRRNNGTLLVQSLHGV | (2010) |
| NO: 423) | FKVKNTTTLQQHLIDGRDMII | Cell 142, |
| | IRMPKDFPPFPQKLKFREPQR | 637-646 |
| | EERICLVTTNFQT | |
| SNIPPER | KSMSSMVSDTSCTFPSSDGIF | Gray, D C., |
| C-TEV | WKHWIQTKDGQCGSPLVSTRD | et al. |
| (SEQ ID | GFIVGIHSASNFTNTNNYFTS | (2010) |
| NO: 424) | VPKNFMELLTNQEAQQWVSGW | Cell 142, |
| | RLNADSVLWGGHKVFMV | 637-646 |
| SNIPPER | ATGGCAGATGATCAGGGCTGTA | Gray, D C., |
| Caspase 7 | TTGAAGAGCAGGGGGTTGAGGA | et al. |
| (SEQ ID | TTCAGCAAATGAAGATTCAGTG | (2010) |
| NO: 425) | GAAAATCTCTACTTCCAGGCTA | Cell 142, |
| | AGCCAGACCGGTCCTCGTTTGT | 637-646 |
| | ACCGTCCCTCTTCAGTAAGAAG | |
| | AAGAAAAATGTCACCATGCGAT | |
| | CCATCAAGACCACCCGGGACCG | |
| | AGTGCCTACATATCAGTACAAC | |
| | ATGAATTTTGAAAAGCTGGGCA | |
| | AATGCATCATAATAAACAACAA | |
| | GAACTTTGATAAAGTGACAGGT | |
| | ATGGGCGTTCGAAACGGAACAG | |
| | ACAAAGATGCCGAGGCGCTCTT | |
| | CAAGTGCTTCCGAAGCCTGGGT | |
| | TTTGACGTGATTGTCTATAATG | |
| | ACTGCTCTTGTGCCAAGATGCA | |
| | AGATCTGCTTAAAAAAGCTTCT | |
| | GAAGAGGACCATACAAATGCCG | |
| | CCTGCTTCGCCTGCATCCTCTT | |
| | AAGCCATGGAGAAGAAAATGTA | |
| | ATTTATGGGAAAGATGGTGTCA | |
| | CACCAATAAAGGATTTGACAGC | |
| | CCACTTTAGGGGGGATAGATGC | |
| | AAAACCCTTTTAGAGAAACCCA | |
| | AACTCTTCTTCATTCAGGCTTG | |
| | CCGAGGGACCGAGCTTGATGAT | |
| | GGCATCCAGGCCGAAAATCTCT | |
| | ACTTCCAGTCGGGGCCCATCAA | |
| | TGACACAGATGCTAATCCTCGA | |
| | TACAAGATCCCAGTGGAAGCTG | |
| | ACTTCCTCTTCGCCTATTCCAC | |
| | GGTTCCAGGCTATTACTCGTGG | |
| | AGGAGCCCAGGAAGAGGCTCCT | |
| | GGTTTGTGCAAGCCCTCTGCTC | |
| | CATCCTGGAGGAGCACGGAAAA | |
| | GACCTGGAAATCATGCAGATCC | |
| | TCACCAGGGTGAATGACAGAGT | |
| | TGCCAGGCACTTTGAGTCTCAG | |
| | TCTGATGACCCACACTTCCATG | |
| | AGAAGAAGCAGATCCCCTGTGT | |
| | GGTCTCCATGCTCACCAAGGAA | |
| | CTCTACTTCAGTCAA | |
| SNIPPER | ATGGAGAACACTGAAAACTCAG | Gray, D C., |
| Caspase 3 | TGGATTCAAAATCCATTAAAAA | et al. |
| (SEQ ID | TTTGGAACCAAAGATCATACAT | (2010) |
| NO: 426) | GGAAGCGAATCAATGGAAAATC | Cell 142, |
| | TCTACTTCCAGTCTGGAATATC | 637-646 |
| | CCTGGACAACAGTTATAAAATG | |
| | GATTATCCTGAGATGGGTTTAT | |
| | GTATAATAATTAATAATAAGAA | |
| | TTTTCATAAAAGCACTGGAATG | |
| | ACATCTCGGTCTGGTACAGATG | |
| | TCGATGCAGCAAACCTCAGGGA | |
| | AACATTCAGAAACTTGAAATAT | |
| | GAAGTCAGGAATAAAAATGATC | |
| | TTACACGTGAAGAAATTGTGGA | |
| | ATTGATGCGTGATGTTTCTAAA | |
| | GAAGATCACAGCAAAAGGAGCA | |
| | GTTTTGTTTGTGTGCTTCTGAG | |
| | CCATGGTGAAGAAGGAATAATT | |
| | TTTGGAACAAATGGACCTGTTG | |
| | ACCTGAAAAAAATAACAAACTT | |
| | TTTCAGAGGGGATCGTTGTAGA | |
| | AGTCTAACTGGAAAACCCAAAC | |
| | TTTTCATTATTCAGGCCTGCCG | |
| | TGGTACAGAACTGGACTGTGGC | |
| | ATTGAGACAGAAAATCTCTACT | |
| | TCCAGAGTGGTGTTGATGATGA | |
| | CATGGCGTGTCATAAAATACCA | |
| | GTGGAGGCCGACTTCTTGTATG | |
| | CATACTCCACAGCACCTGGTTA | |
| | TTATTCTTGGCGAAATTCAAAG | |
| | GATGGCTCCTGGTTCATCCAGT | |
| | CGCTTTGTGCCATGCTGAAACA | |
| | GTATGCCGACAAGCTTGAATTT | |
| | ATGCACATTCTTACCCGGGTTA | |
| | ACCGAAAGGTGGCAACAGAATT | |
| | TGAGTCCTTTTCCTTTGACGCT | |
| | ACTTTTCATGCAAAGAAACAGA | |
| | TTCCATGTATTGTTTCCATGCT | |
| | CACAAAAGAACTCTATTTTTAT | |
| | CAC | |

### Split-Detection Constructs

[0577] A system of the invention further includes guides for localizing the CRISPR proteins with linked enzyme portions on a transcript of interest that may be present in a cell or tissue. According, the system includes a first guide that binds to the first CRISPR protein and hybridizes to the transcript of interest and a second guide that binds to the second CRISPR protein and hybridizes to the nucleic acid of interest. In most embodiments, it is preferred that the first and second guide hybridize to the nucleic acid of interest at adjacent locations. The locations can be directly adjacent or separated by a few nucleotides, such as separated by 1nt, 2 nts, 3 nts, 4 nts, 5 nts, 6 nts, 7 nts, 8 nts, 9 nts, 10 nts, 11 nts, 12 nts, or more. In certain embodiments, the first and second guides can bind to locations separated on a nucleic acid by an expected stem loop. Though separated along the linear nucleic acid, the nucleic acid may take on a secondary structure that brings the guide target sequences into close proximity.

[0578] In an embodiment of the invention, the proteolytic enzyme comprises a caspase. In an embodiment of the invention, the proteolytic enzyme comprises an initiator caspase, such as but not limited caspase 8 or caspase 9. Initiator caspases are generally inactive as a monomer and gain activity upon homodimerization. In an embodiment of the invention, the proteolytic enzyme comprises an effector caspase, such as but not limited to caspase 3 or caspase 7. Such initiator caspases are normally inactive until cleaved into fragments. Once cleaved the fragments associate to form an active enzyme. In one exemplary embodiment, the first portion of the proteolytic enzyme comprises caspase 3 p12 and the complementary portion of the proteolytic enzyme comprises caspase 3 p17.

[0579] In an embodiment of the invention, the proteolytic enzyme is chosen to target a particular amino acid sequence and a substrate is chosen or engineered accordingly. A non-limiting example of such a protease is tobacco etch virus (TEV) protease. Accordingly, a substrate cleavable by TEV protease, which in some embodiments is engineered to be cleavable, serves as the system component acted upon by the protease. In one embodiment, the NEV protease substrate comprises a procaspase and one or more TEV cleavage sites. The procaspase can be, for example, caspase 3 or caspase 7 engineered to be cleavable by the reconstituted TEV protease. Once cleaved, the procaspase fragments are free to take on an active confirmation.

[0580] In an embodiment of the invention, the TEV substrate comprises a fluorescent protein and a TEV cleavage site. In another embodiment, the TEV substrate comprises a luminescent protein and a TEV cleavage site. In certain embodiments, the TEV cleavage site provides for cleavage of the substrate such that the fluorescent or luminescent property of the substrate protein is lost upon cleavage. In certain embodiments, the fluorescent or luminescent protein can be modified, for example by appending a moiety which interferes with fluorescence or luminescence which is then cleaved when the TEV protease is reconstituted.

[0581] According to the invention, there is provided a method of providing a proteolytic activity in a cell which contains a nucleic acid of interest, which comprises contacting the nucleic acid in the cell with a composition which comprises a first CRIPSR protein linked to an inactive first portion of a proteolytic enzyme, and a second CRISPR protein linked to the complementary portion of the proteolytic enzyme wherein the activity of the proteolytic enzyme is reconstituted when the first portion and the complementary portion of the protein are contacted, and a first guide that binds to the first CRISPR protein and hybridizes to a first target sequence of the nucleic acid, and a second guide that binds to the second CRISPR protein and hybridizes to a second target sequence of the nucleic acid. When the target nucleic acid of interest is present, the first and second portions of the proteolytic enzyme are contacted, the proteolytic activity of the enzyme is reconstituted, and a substrate of the enzyme is cleaved.

[0582] Split-fluorophore constructs are useful for imaging with reduced background via reconstitution of a split fluorophore upon binding of two C2c1 proteins to a transcript. These split proteins include iSplit (Filonov, G. S., and Verkhusha, V. V. (2013). A near-infrared BiFC reporter for in vivo imaging of protein-protein interactions. Chem. Biol. 20, 1078-1086.), Split Venus (Wu, B., Chen, J., and Singer, R. H. (2014). Background free imaging of single mRNAs in live cells using split fluorescent proteins. Sci. Rep. 4, 3615.), and Split superpositive GFP (Blakeley, B. D., Chapman, A. M., and McNaughton, B. R. (2012). Split-superpositive GFP reassembly is a fast, efficient, and robust method for detecting protein-protein interactions in vivo. Mol. Biosyst. 8, 2036-2040. Such proteins are set forth in Table 4 below:

TABLE 4
Imaging Components

| iSplit | MAEGSVARQPDLLTCDDEPIHIPGAIQPH | Filonov, |
|---|---|---|
| PAS | GLLLALAADMTIVAGSDNLPELTGLAIGA | G. S., and |
| domain | LIGRSAADVFDSETHNRLTIALAEPGAAV | Verkhusha, |
| of iRFP | GAPITVGFTMRKDAGFIGSWHRHDQLIFL | V. V. |
| (N-term) | ELEPPQRGGSEVSALEKEVSALEKEVSAL | (2013). |
| (SEQ ID | EKEVSALEKEVSALEKGGS* | Chem. |
| NO: 427) | | Biol. 20, |
| | | 1078-1086 |
| iSplit | MGGSKVSALKEKVSALKEKVSALKEKVS | Filonov, |
| GAFm | ALKEKVSALKEGGSPPQRDVAEPQAFFRR | G. S., and |
| domain | TNSAIRRLQAAETLESACAAAAQEVRKIT | Verkhusha, |
| of iRFP | GYDRVMIYRFASDFSGEVIAEDRCAEVES | V. V. |
| (C-term) | KLGLHYPASTVPAQARRLYTINPVRIIPD | (2013). |
| (SEQ ID | INYRPVPVTPYLNPVTGRPIDLSFAILRS | Chem. |
| NO: 428) | VSPVHLEFMRNIGMHGTMSISILRGERLW | Biol. 20, |
| | GLIVCHHRTPYYVDLDGRQACELVAQVLA | 1078-1086 |
| | RQIGVMEE* | |
| Split | MVSKGEELFTGVVPILVELDGDVNGHKFS | Wu, B., |
| Venus | VSGEGEGDATYGKLTLKLICTTGKLPVPW | Chen, J., |
| N-term | PTLVTTLGYGLQCFARYPDHMKQHDFFKS | and |
| (SEQ ID | AMPEGYVQERTIFFKDDGNYKTRAEVKFE | Singer, |
| NO: 429) | GDTLVNRIELKGIDFKEDGNILGHKLEYN | R. H. |
| | YNSHNVYIT* | (2014). |
| | | Sci. Rep. |
| | | 4, 3615. |
| Split | ADKQKNGIKANFKIRHNIEDGGVQLADHY | Wu, B., |
| Venus | QQNTPIGDGPVLLPDNHYLSYQSALSKDP | Chen, J., |
| C-term | NEKRDHMVLLEFVTAAGITLGMDELYK | and |
| (SEQ ID | | Singer, |
| NO: 430) | | R. H. |
| | | (2014). |
| | | Sci. Rep. |
| | | 4, 3615. |
| Split | SKGERLFRGKVPILVELKGDVNGHKFSVR | Blakeley, |
| super- | GEGKGDATRGKLTLKFICTTGKLPVPWPT | B. D., |
| posi- | LVTTLTYGVQCFSRYPKHMKRHDFFKSA | Chapman, |
| tive | MPKGYVQERTISFKKDGKYKTRAEVKFE | A. M., and |
| GFP | GRTLVNRIKLKGRDFKEKGNILGHKLRYN | McNaughton, |
| N-term | FNSHKVYITADKR | B. R. |
| (SEQ ID | | (2012). |
| NO: 431) | | Mol. |
| | | Biosyst. |
| | | 8, |
| | | 2036-2040. |
| Split | KNGIKAKFKIRHNVKDGSVQLADHYQQN | Blakeley, |
| super- | TPIGRGPVLLPRNHYLSTRSKLSKDPKEK | B. D., |
| posi- | RDHMVLLEFVTAAGIKHGRDERYK | Chapman, |
| tive | | A. M., and |
| GFP | | McNaughton, |
| C-term | | B. R. |
| (SEQ ID | | (2012). |
| NO: 432) | | Mol. |
| | | Biosyst. |
| | | 8, |
| | | 2036-2040. |

Target Enrichment with dCas

[0583] In certain example embodiments, target RNA or DNA may first be enriched prior to detection or amplification of the target RNA or DNA. In certain example embodiments, this enrichment may be achieved by binding of the target nucleic acids by a CRISPR effector system.

[0584] Current target-specific enrichment protocols require single-stranded nucleic acid prior to hybridization with probes. Among various advantages, the present embodiments can skip this step and enable direct targeting to double-stranded DNA (either partly or completely double-stranded). In addition, the embodiments disclosed herein are enzyme-driven targeting methods that offer faster kinetics and easier workflow allowing for isothermal enrichment. In certain example embodiments enrichment may take place at temperatures as low as 20-37° C. In certain example embodiments, a set of guide RNAs to different target nucleic acids are used in a single assay, allowing for detection of multiple targets and/or multiple variants of a single target.

[0585] In certain example embodiments, a dead CRISPR effector protein may bind the target nucleic acid in solution and then subsequently be isolated from said solution. For example, the dead CRISPR effector protein bound to the target nucleic acid, may be isolated from the solution using an antibody or other molecule, such as an aptamer, that specifically binds the dead CRISPR effector protein.

[0586] In other example embodiments, the dead CRISPR effector protein may bound to a solid substrate. A fixed substrate may refer to any material that is appropriate for or can be modified to be appropriate for the attachment of a polypeptide or a polynucleotide. Possible substrates include, but are not limited to, glass and modified functionalized glass, plastics (including acrylics, polystyrene and copolymers of styrene and other materials, polypropylene, polyethylene, polybutylene, polyurethanes, Teflon™, etc.), polysaccharides, nylon or nitrocellulose, ceramics, resins, silica or silica-based materials including silicon and modified silicon, carbon, metals, inorganic glasses, plastics, optical fiber bundles, and a variety of other polymers. In some embodiments, the solid support comprises a patterned surface suitable for immobilization of molecules in an ordered pattern. In certain embodiments a patterned surface refers to an arrangement of different regions in or on an exposed layer of a solid support. In some embodiments, the solid support comprises an array of wells or depressions in a surface. The composition and geometry of the solid support can vary with its use. In some embodiments, the solids support is a planar structure such as a slide, chip, microchip and/or array. As such, the surface of the substrate can be in the form of a planar layer. In some embodiments, the solid support comprises one or more surfaces of a flowcell. The term “flowcell” as used herein refers to a chamber comprising a solid surface across which one or more fluid reagents can be flowed. Example flowcells and related fluidic systems and detection platforms that can be readily used in the methods of the present disclosure are described, for example, in Bentley et al. Nature 456:53-59 (2008), WO 04/0918497, U.S. Pat. No. 7,057,026; WO 91/06678; WO 07/123744; U.S. Pat. Nos. 7,329,492; 7,211,414; 7,315,019; 7,405,281, and US 2008/0108082. In some embodiments, the solid support or its surface is non-planar, such as the inner or outer surface of a tube or vessel. In some embodiments, the solid support comprise microspheres or beads. “Microspheres,” “bead,” “particles,” are intended to mean within the context of a solid substrate to mean small discrete particles made of various material including, but not limited to, plastics, ceramics, glass, and polystyrene. In certain embodiments, the microspheres are magnetic microspheres or beads. Alternatively or additionally, the beads may be porous. The bead sizes range from nanometers, e.g. 100 nm, to millimeters, e.g. 1 mm.

[0587] A sample containing, or suspected of containing, the target nucleic acids may then be exposed to the substrate to allow binding of the target nucleic acids to the bound dead CRISPR effector protein. Non-target molecules may then be washed away. In certain example embodiments, the target nucleic acids may then be released from the CRISPR effector protein/guide RNA complex for further detection using the methods disclosed herein. In certain example embodiments, the target nucleic acids may first be amplified as described herein.

[0588] In certain example embodiments, the CRISPR effector may be labeled with a binding tag. In certain example embodiments the CRISPR effector may be chemically tagged. For example, the CRISPR effector may be chemically biotinylated. In another example embodiment, a fusion may be created by adding additional sequence encoding a fusion to the CRISPR effector. One example of such a fusion is an AviTag™, which employs a highly targeted enzymatic conjugation of a single biotin on a unique 15 amino acid peptide tag. In certain embodiments, the CRISPR effector may be labeled with a capture tag such as, but not limited to, GST, Myc, hemagglutinin (HA), green fluorescent protein (GFP), flag, His tag, TAP tag, and Fc tag. The binding tag, whether a fusion, chemical tag, or capture tag, may be used to either pull down the CRISPR effector system once it has bound a target nucleic acid or to fix the CRISPR effector system on the solid substrate.

[0589] In certain example embodiments, the guide RNA may be labeled with a binding tag. In certain example embodiments, the entire guide RNA may be labeled using in vitro transcription (IVT) incorporating one or more biotinylated nucleotides, such as, biotinylated uracil. In some embodiments, biotin can be chemically or enzymatically added to the guide RNA, such as, the addition of one or more biotin groups to the 3′ end of the guide RNA. The binding tag may be used to pull down the guide RNA/target nucleic acid complex after binding has occurred, for example, by exposing the guide RNA/target nucleic acid to a streptavidin coated solid substrate.

### Truncations

[0590] In certain example embodiments, the Cas12 protein may be truncated. In certain example embodiments, the truncated version may be a deactivated or dead Cas12 protein. The Cas12 protein may be modified on the N-terminus, C-terminus, or both. In one example embodiment, 1, 2, 3, 4, 5, 6, 7, 8, 9, 10, 11, 12, 13, 14, 15, 16, 17, 18, 19, 20, 21, 22, 23, 24, 25, 26, 27, 28, 29, 30, 31, 32, 33, 34, 35, 36, 37, 38, 39, 40, 41, 42, 43, 44, 45, 46, 47, 48, 49, 50, 52, 53, 54, 55, 56, 57, 58, 59, 60, 61, 62, 63, 64, 65, 66, 67, 68, 69, 70, 71, 72, 73, 74, 75, 76, 77, 78, 79, 80, 81, 82, 83, 84, 85, 86, 87, 88, 89, 90, 91, 92, 93, 94, 95, 96, 97, 98, 99, 100, 101, 102, 103, 104, 105, 106, 107, 108, 109, 110, 111, 112, 113, 114, 115, 116, 117, 118, 119, 120, 121, 122, 123, 124, 125, 126, 127, 128, 129, 130, 131, 132, 133, 134, 135, 136, 137, 138, 139, 140, 141, 142, 143, 144, 145, 146, 147, 148, 149, 150 amino acids are removed from the N-terminus, C-terminus, or combination thereof. In another example embodiment, 1, 2, 3, 4, 5, 6, 7, 8, 9, 10, 11, 12, 13, 14, 15, 16, 17, 18, 19, 20, 21, 22, 23, 24, 25, 26, 27, 28, 29, 30, 31, 32, 33, 34, 35, 36, 37, 38, 39, 40, 41, 42, 43, 44, 45, 46, 47, 48, 49, 50, 52, 53, 54, 55, 56, 57, 58, 59, 60, 61, 62, 63, 64, 65, 66, 67, 68, 69, 70, 71, 72, 73, 74, 75, 76, 77, 78, 79, 80, 81, 82, 83, 84, 85, 86, 87, 88, 89, 90, 91, 92, 93, 94, 95, 96, 97, 98, 99, 100, 101, 102, 103, 104, 105, 106, 107, 108, 109, 110, 111, 112, 113, 114, 115, 116, 117, 118, 119, 120, 121, 122, 123, 124, 125, 126, 127, 128, 129, 130, 131, 132, 133, 134, 135, 136, 137, 138, 139, 140, 141, 142, 143, 144, 145, 146, 147, 148, 149, 150 amino acids are removed from the C-terminus. In certain example embodiments, 1-10, 1-20, 1-30, 1-40, 1-50, 1-60, 1-70, 1-80, 1-90, 1-100, 1-110, 1-120, 1-130, 1-140, 1-150, 1-160, 1-170, 1-180, 1-190, 1-200, 1-220, 1-230, 1-240, 1-250, 200-250, 100-200, 110-200, 120-200, 130-200, 140-200, 150-200, 160-200, 170-200, 180-200, 190-200, 10-100, 20-100, 30-100, 40-100, 50-100, 60-100, 70-100, 80-100, 90-100, or 150-250 amino acids are removed the N-terminus, C-terminus or a combination thereof. In certain example embodiments, the amino acid positions are those of BhCas12b or amino acids of orthologs corresponding thereto. In certain example embodiments, the truncations may be fused or otherwise attached to nucleotide deaminase and used in the base editing embodiments disclosed in further detail below.

### Base Editing

[0591] In certain example embodiments, a Cas12b, e.g., dCas12b, can be fused with a adenosine deaminase or cytidine deaminase for base editing purposes.

### Adenosine Deaminase

[0592] The term “adenosine deaminase” or “adenosine deaminase protein” as used herein refers to a protein, a polypeptide, or one or more functional domain(s) of a protein or a polypeptide that is capable of catalyzing a hydrolytic deamination reaction that converts an adenine (or an adenine moiety of a molecule) to a hypoxanthine (or a hypoxanthine moiety of a molecule), as shown below. In some embodiments, the adenine-containing molecule is an adenosine (A), and the hypoxanthine-containing molecule is an inosine (I). The adenine-containing molecule can be deoxyribonucleic acid (DNA) or ribonucleic acid (RNA).

[chemical structure]

[0593] According to the present disclosure, adenosine deaminases that can be used in connection with the present disclosure include, but are not limited to, members of the enzyme family known as adenosine deaminases that act on RNA (ADARs), members of the enzyme family known as adenosine deaminases that act on tRNA (ADATs), and other adenosine deaminase domain-containing (ADAD) family members. According to the present disclosure, the adenosine deaminase is capable of targeting adenine in a RNA/DNA and RNA duplexes. Indeed, Zheng et al. (Nucleic Acids Res. 2017, 45(6): 3369-3377) demonstrate that ADARs can carry out adenosine to inosine editing reactions on RNA/DNA and RNA/RNA duplexes. In particular embodiments, the adenosine deaminase has been modified to increase its ability to edit DNA in a RNA/DNA heteroduplex of in an RNA duplex as detailed herein below.

[0594] In some embodiments, the adenosine deaminase is derived from one or more metazoa species, including but not limited to, mammals, birds, frogs, squids, fish, flies and worms. In some embodiments, the adenosine deaminase is a human, squid or Drosophila adenosine deaminase.

[0595] In some embodiments, the adenosine deaminase is a human ADAR, including hADAR, hADAR2, hADAR3. In some embodiments, the adenosine deaminase is a Caenorhabditis elegans ADAR protein, including ADR-1 and ADR-2. In some embodiments, the adenosine deaminase is a Drosophila ADAR protein, including dAdar. In some embodiments, the adenosine deaminase is a squid Loligo pealeii ADAR protein, including sqADAR2a and sqADAR2b. In some embodiments, the adenosine deaminase is a human ADAT protein. In some embodiments, the adenosine deaminase is a Drosophila ADAT protein. In some embodiments, the adenosine deaminase is a human ADAD protein, including TENR (hADAD1) and TENRL (hADAD2).

[0596] In some embodiments, the adenosine deaminase is a TadA protein such as E. coli TadA. See Kim et al., Biochemistry 45:6407-6416 (2006); Wolf et al., EMBO J. 21:3841-3851 (2002). In some embodiments, the adenosine deaminase is mouse ADA. See Grunebaum et al., Curr. Opin. Allergy Clin. Immunol. 13:630-638 (2013). In some embodiments, the adenosine deaminase is human ADAT2. See Fukui et al., J. Nucleic Acids 2010:260512 (2010). In some embodiments, the deaminase (e.g., adenosine or cytidine deaminase) is one or more of those described in Cox et al., Science. 2017, Nov. 24; 358(6366): 1019-1027; Komore et al., Nature. 2016 May 19; 533(7603):420-4; and Gaudelli et al., Nature. 2017 Nov. 23; 551(7681):464-471.

[0597] In some embodiments, the adenosine deaminase protein recognizes and converts one or more target adenosine residue(s) in a double-stranded nucleic acid substrate into inosine residues (s). In some embodiments, the double-stranded nucleic acid substrate is a RNA-DNA hybrid duplex. In some embodiments, the adenosine deaminase protein recognizes a binding window on the double-stranded substrate. In some embodiments, the binding window contains at least one target adenosine residue(s). In some embodiments, the binding window is in the range of about 3 bp to about 100 bp. In some embodiments, the binding window is in the range of about 5 bp to about 50 bp. In some embodiments, the binding window is in the range of about 10 bp to about 30 bp. In some embodiments, the binding window is about 1 bp, 2 bp, 3 bp, 5 bp, 7 bp, 10 bp, 15 bp, 20 bp, 25 bp, 30 bp, 40 bp, 45 bp, 50 bp, 55 bp, 60 bp, 65 bp, 70 bp, 75 bp, 80 bp, 85 bp, 90 bp, 95 bp, or 100 bp.

[0598] In some embodiments, the adenosine deaminase protein comprises one or more deaminase domains. Not intended to be bound by a particular theory, it is contemplated that the deaminase domain functions to recognize and convert one or more target adenosine (A) residue(s) contained in a double-stranded nucleic acid substrate into inosine (I) residue(s). In some embodiments, the deaminase domain comprises an active center. In some embodiments, the active center comprises a zinc ion. In some embodiments, during the A-to-I editing process, base pairing at the target adenosine residue is disrupted, and the target adenosine residue is “flipped” out of the double helix to become accessible by the adenosine deaminase. In some embodiments, amino acid residues in or near the active center interact with one or more nucleotide(s) 5′ to a target adenosine residue. In some embodiments, amino acid residues in or near the active center interact with one or more nucleotide(s) 3′ to a target adenosine residue. In some embodiments, amino acid residues in or near the active center further interact with the nucleotide complementary to the target adenosine residue on the opposite strand. In some embodiments, the amino acid residues form hydrogen bonds with the 2′ hydroxyl group of the nucleotides.

[0599] In some embodiments, the adenosine deaminase comprises human ADAR2 full protein (hADAR2) or the deaminase domain thereof (hADAR2-D). In some embodiments, the adenosine deaminase is an ADAR family member that is homologous to hADAR2 or hADAR2-D.

[0600] Particularly, in some embodiments, the homologous ADAR protein is human ADAR1 (hADAR1) or the deaminase domain thereof (hADAR1-D). In some embodiments, glycine 1007 of hADAR1-D corresponds to glycine 487 hADAR2-D, and glutamic Acid 1008 of hADAR1-D corresponds to glutamic acid 488 of hADAR2-D.

[0601] In some embodiments, the adenosine deaminase comprises the wild-type amino acid sequence of hADAR2-D. In some embodiments, the adenosine deaminase comprises one or more mutations in the hADAR2-D sequence, such that the editing efficiency, and/or substrate editing preference of hADAR2-D is changed according to specific needs.

[0602] Certain mutations of hADAR1 and hADAR2 proteins have been described in Kuttan et al., Proc Natl Acad Sci USA. (2012) 109(48):E3295-304; Want et al. ACS Chem Biol. (2015) 10(11):2512-9; and Zheng et al. Nucleic Acids Res. (2017) 45(6):3369-337, each of which is incorporated herein by reference in its entirety.

[0603] In some embodiments, the adenosine deaminase comprises a mutation at glycine336 of the hADAR2-D amino acid sequence, or a corresponding position in a homologous ADAR protein. In some embodiments, the glycine residue at position 336 is replaced by an aspartic acid residue (G336D).

[0604] In some embodiments, the adenosine deaminase comprises a mutation at Glycine487 of the hADAR2-D amino acid sequence, or a corresponding position in a homologous ADAR protein. In some embodiments, the glycine residue at position 487 is replaced by a non-polar amino acid residue with relatively small side chains. For example, in some embodiments, the glycine residue at position 487 is replaced by an alanine residue (G487A). In some embodiments, the glycine residue at position 487 is replaced by a valine residue (G487V). In some embodiments, the glycine residue at position 487 is replaced by an amino acid residue with relatively large side chains. In some embodiments, the glycine residue at position 487 is replaced by a arginine residue (G487R). In some embodiments, the glycine residue at position 487 is replaced by a lysine residue (G487K). In some embodiments, the glycine residue at position 487 is replaced by a tryptophan residue (G487 W). In some embodiments, the glycine residue at position 487 is replaced by a tyrosine residue (G487Y).

[0605] In some embodiments, the adenosine deaminase comprises a mutation at glutamic acid488 of the hADAR2-D amino acid sequence, or a corresponding position in a homologous ADAR protein. In some embodiments, the glutamic acid residue at position 488 is replaced by a glutamine residue (E488Q). In some embodiments, the glutamic acid residue at position 488 is replaced by a histidine residue (E488H). In some embodiments, the glutamic acid residue at position 488 is replace by an arginine residue (E488R). In some embodiments, the glutamic acid residue at position 488 is replace by a lysine residue (E488K). In some embodiments, the glutamic acid residue at position 488 is replace by an asparagine residue (E488N). In some embodiments, the glutamic acid residue at position 488 is replace by an alanine residue (E488A). In some embodiments, the glutamic acid residue at position 488 is replace by a Methionine residue (E488M). In some embodiments, the glutamic acid residue at position 488 is replace by a serine residue (E488S). In some embodiments, the glutamic acid residue at position 488 is replace by a phenylalanine residue (E488F). In some embodiments, the glutamic acid residue at position 488 is replace by a lysine residue (E488L). In some embodiments, the glutamic acid residue at position 488 is replace by a tryptophan residue (E488 W).

[0606] In some embodiments, the adenosine deaminase comprises a mutation at threonine490 of the hADAR2-D amino acid sequence, or a corresponding position in a homologous ADAR protein. In some embodiments, the threonine residue at position 490 is replaced by a cysteine residue (T490C). In some embodiments, the threonine residue at position 490 is replaced by a serine residue (T490S). In some embodiments, the threonine residue at position 490 is replaced by an alanine residue (T490A). In some embodiments, the threonine residue at position 490 is replaced by a phenylalanine residue (T490F). In some embodiments, the threonine residue at position 490 is replaced by a tyrosine residue (T490Y). In some embodiments, the threonine residue at position 490 is replaced by a serine residue (T490R). In some embodiments, the threonine residue at position 490 is replaced by an alanine residue (T490K). In some embodiments, the threonine residue at position 490 is replaced by a phenylalanine residue (T490P). In some embodiments, the threonine residue at position 490 is replaced by a tyrosine residue (T490E).

[0607] In some embodiments, the adenosine deaminase comprises a mutation at valine493 of the hADAR2-D amino acid sequence, or a corresponding position in a homologous ADAR protein. In some embodiments, the valine residue at position 493 is replaced by an alanine residue (V493A). In some embodiments, the valine residue at position 493 is replaced by a serine residue (V493S). In some embodiments, the valine residue at position 493 is replaced by a threonine residue (V493T). In some embodiments, the valine residue at position 493 is replaced by an arginine residue (V493R). In some embodiments, the valine residue at position 493 is replaced by an aspartic acid residue (V493D). In some embodiments, the valine residue at position 493 is replaced by a proline residue (V493P). In some embodiments, the valine residue at position 493 is replaced by a glycine residue (V493G).

[0608] In some embodiments, the adenosine deaminase comprises a mutation at alanine589 of the hADAR2-D amino acid sequence, or a corresponding position in a homologous ADAR protein. In some embodiments, the alanine residue at position 589 is replaced by a valine residue (A589V).

[0609] In some embodiments, the adenosine deaminase comprises a mutation at asparagine597 of the hADAR2-D amino acid sequence, or a corresponding position in a homologous ADAR protein. In some embodiments, the asparagine residue at position 597 is replaced by a lysine residue (N597K). In some embodiments, the adenosine deaminase comprises a mutation at position 597 of the amino acid sequence, which has an asparagine residue in the wild type sequence. In some embodiments, the asparagine residue at position 597 is replaced by an arginine residue (N597R). In some embodiments, the adenosine deaminase comprises a mutation at position 597 of the amino acid sequence, which has an asparagine residue in the wild type sequence. In some embodiments, the asparagine residue at position 597 is replaced by an alanine residue (N597A). In some embodiments, the adenosine deaminase comprises a mutation at position 597 of the amino acid sequence, which has an asparagine residue in the wild type sequence. In some embodiments, the asparagine residue at position 597 is replaced by a glutamic acid residue (N597E). In some embodiments, the adenosine deaminase comprises a mutation at position 597 of the amino acid sequence, which has an asparagine residue in the wild type sequence. In some embodiments, the asparagine residue at position 597 is replaced by a histidine residue (N597H). In some embodiments, the adenosine deaminase comprises a mutation at position 597 of the amino acid sequence, which has an asparagine residue in the wild type sequence. In some embodiments, the asparagine residue at position 597 is replaced by a glycine residue (N597G). In some embodiments, the adenosine deaminase comprises a mutation at position 597 of the amino acid sequence, which has an asparagine residue in the wild type sequence. In some embodiments, the asparagine residue at position 597 is replaced by a tyrosine residue (N597Y). In some embodiments, the asparagine residue at position 597 is replaced by a phenylalanine residue (N597F). In some embodiments, the adenosine deaminase comprises mutation N597I. In some embodiments, the adenosine deaminase comprises mutation N597L. In some embodiments, the adenosine deaminase comprises mutation N597V. In some embodiments, the adenosine deaminase comprises mutation N597M. In some embodiments, the adenosine deaminase comprises mutation N597C. In some embodiments, the adenosine deaminase comprises mutation N597P. In some embodiments, the adenosine deaminase comprises mutation N597T. In some embodiments, the adenosine deaminase comprises mutation N597S. In some embodiments, the adenosine deaminase comprises mutation N597 W. In some embodiments, the adenosine deaminase comprises mutation N597Q. In some embodiments, the adenosine deaminase comprises mutation N597D. In certain example embodiments, the mutations at N597 described above are further made in the context of an E488Q background

[0610] In some embodiments, the adenosine deaminase comprises a mutation at serine599 of the hADAR2-D amino acid sequence, or a corresponding position in a homologous ADAR protein. In some embodiments, the serine residue at position 599 is replaced by a threonine residue (S599T).

[0611] In some embodiments, the adenosine deaminase comprises a mutation at asparagine613 of the hADAR2-D amino acid sequence, or a corresponding position in a homologous ADAR protein. In some embodiments, the asparagine residue at position 613 is replaced by a lysine residue (N613K). In some embodiments, the adenosine deaminase comprises a mutation at position 613 of the amino acid sequence, which has an asparagine residue in the wild type sequence. In some embodiments, the asparagine residue at position 613 is replaced by an arginine residue (N613R). In some embodiments, the adenosine deaminase comprises a mutation at position 613 of the amino acid sequence, which has an asparagine residue in the wild type sequence. In some embodiments, the asparagine residue at position 613 is replaced by an alanine residue (N613A) In some embodiments, the adenosine deaminase comprises a mutation at position 613 of the amino acid sequence, which has an asparagine residue in the wild type sequence. In some embodiments, the asparagine residue at position 613 is replaced by a glutamic acid residue (N613E). In some embodiments, the adenosine deaminase comprises mutation N613I. In some embodiments, the adenosine deaminase comprises mutation N613L. In some embodiments, the adenosine deaminase comprises mutation N613V. In some embodiments, the adenosine deaminase comprises mutation N613F. In some embodiments, the adenosine deaminase comprises mutation N613M. In some embodiments, the adenosine deaminase comprises mutation N613C. In some embodiments, the adenosine deaminase comprises mutation N613G. In some embodiments, the adenosine deaminase comprises mutation N613P. In some embodiments, the adenosine deaminase comprises mutation N613T. In some embodiments, the adenosine deaminase comprises mutation N613S. In some embodiments, the adenosine deaminase comprises mutation N613Y. In some embodiments, the adenosine deaminase comprises mutation N613 W. In some embodiments, the adenosine deaminase comprises mutation N613Q. In some embodiments, the adenosine deaminase comprises mutation N613H. In some embodiments, the adenosine deaminase comprises mutation N613D. In some embodiments, the mutations at N613 described above are further made in combination with a E488Q mutation.

[0612] In some embodiments, to improve editing efficiency, the adenosine deaminase may comprise one or more of the mutations: G336D, G487A, G487V, E488Q, E488H, E488R, E488N, E488A, E488S, E488M, T490C, T490S, V493T, V493S, V493A, V493R, V493D, V493P, V493G, N597K, N597R, N597A, N597E, N597H, N597G, N597Y, A589V, S599T, N613K, N613R, N613A, N613E, based on amino acid sequence positions of hADAR2-D, and mutations in a homologous ADAR protein corresponding to the above.

[0613] In some embodiments, to reduce editing efficiency, the adenosine deaminase may comprise one or more of the mutations: E488F, E488L, E488 W, T490A, T490F, T490Y, T490R, T490K, T490P, T490E, N597F, based on amino acid sequence positions of hADAR2-D, and mutations in a homologous ADAR protein corresponding to the above. In particular embodiments, it can be of interest to use an adenosine deaminase enzyme with reduced efficacy to reduce off-target effects.

[0614] In some embodiments, to reduce off-target effects, the adenosine deaminase comprises one or more of mutations at R348, V351, T375, K376, E396, C451, R455, N473, R474, K475, R477, R481, S486, E488, T490, S495, R510, based on amino acid sequence positions of hADAR2-D, and mutations in a homologous ADAR protein corresponding to the above. In some embodiments, the adenosine deaminase comprises mutation at E488 and one or more additional positions selected from R348, V351, T375, K376, E396, C451, R455, N473, R474, K475, R477, R481, S486, T490, S495, R510. In some embodiments, the adenosine deaminase comprises mutation at T375, and optionally at one or more additional positions. In some embodiments, the adenosine deaminase comprises mutation at N473, and optionally at one or more additional positions. In some embodiments, the adenosine deaminase comprises mutation at V351, and optionally at one or more additional positions. In some embodiments, the adenosine deaminase comprises mutation at E488 and T375, and optionally at one or more additional positions. In some embodiments, the adenosine deaminase comprises mutation at E488 and N473, and optionally at one or more additional positions. In some embodiments, the adenosine deaminase comprises mutation E488 and V351, and optionally at one or more additional positions. In some embodiments, the adenosine deaminase comprises mutation at E488 and one or more of T375, N473, and V351.

[0615] In some embodiments, to reduce off-target effects, the adenosine deaminase comprises one or more of mutations selected from R348E, V351L, T375G, T375S, R455G, R455S, R455E, N473D, R474E, K475Q, R477E, R481E, S486T, E488Q, T490A, T490S, S495T, and R510E, based on amino acid sequence positions of hADAR2-D, and mutations in a homologous ADAR protein corresponding to the above. In some embodiments, the adenosine deaminase comprises mutation E488Q and one or more additional mutations selected from R348E, V351L, T375G, T375S, R455G, R455S, R455E, N473D, R474E, K475Q, R477E, R481E, S486T, T490A, T490S, S495T, and R510E. In some embodiments, the adenosine deaminase comprises mutation T375G or T375S, and optionally one or more additional mutations. In some embodiments, the adenosine deaminase comprises mutation N473D, and optionally one or more additional mutations. In some embodiments, the adenosine deaminase comprises mutation V351L, and optionally one or more additional mutations. In some embodiments, the adenosine deaminase comprises mutation E488Q, and T375G or T375G, and optionally one or more additional mutations. In some embodiments, the adenosine deaminase comprises mutation E488Q and N473D, and optionally one or more additional mutations. In some embodiments, the adenosine deaminase comprises mutation E488Q and V351L, and optionally one or more additional mutations. In some embodiments, the adenosine deaminase comprises mutation E488Q and one or more of T375G/S, N473D and V351L.

[0616] In certain examples, the adenosine deaminase protein or catalytic domain thereof has been modified to comprise a mutation at E488, preferably E488Q, of the hADAR2-D amino acid sequence, or a corresponding position in a homologous ADAR protein and/or wherein the adenosine deaminase protein or catalytic domain thereof has been modified to comprise a mutation at T375, preferably T375G of the hADAR2-D amino acid sequence, or a corresponding position in a homologous ADAR protein. In certain examples, the adenosine deaminase protein or catalytic domain thereof has been modified to comprise a mutation at E1008, preferably E1008Q, of the hADAR1d amino acid sequence, or a corresponding position in a homologous ADAR protein.

[0617] Crystal structures of the human ADAR2 deaminase domain bound to duplex RNA reveal a protein loop that binds the RNA on the 5′ side of the modification site. This 5′ binding loop is one contributor to substrate specificity differences between ADAR family members. See Wang et al., Nucleic Acids Res., 44(20):9872-9880 (2016), the content of which is incorporated herein by reference in its entirety. In addition, an ADAR2-specific RNA-binding loop was identified near the enzyme active site. See Mathews et al., Nat. Struct. Mol. Biol., 23(5):426-33 (2016), the content of which is incorporated herein by reference in its entirety. In some embodiments, the adenosine deaminase comprises one or more mutations in the RNA binding loop to improve editing specificity and/or efficiency.

[0618] In some embodiments, the adenosine deaminase comprises a mutation at alanine454 of the hADAR2-D amino acid sequence, or a corresponding position in a homologous ADAR protein. In some embodiments, the alanine residue at position 454 is replaced by a serine residue (A454S). In some embodiments, the alanine residue at position 454 is replaced by a cysteine residue (A454C). In some embodiments, the alanine residue at position 454 is replaced by an aspartic acid residue (A454D).

[0619] In some embodiments, the adenosine deaminase comprises a mutation at arginine455 of the hADAR2-D amino acid sequence, or a corresponding position in a homologous ADAR protein. In some embodiments, the arginine residue at position 455 is replaced by an alanine residue (R455A). In some embodiments, the arginine residue at position 455 is replaced by a valine residue (R455V). In some embodiments, the arginine residue at position 455 is replaced by a histidine residue (R455H). In some embodiments, the arginine residue at position 455 is replaced by a glycine residue (R455G). In some embodiments, the arginine residue at position 455 is replaced by a serine residue (R455S). In some embodiments, the arginine residue at position 455 is replaced by a glutamic acid residue (R455E). In some embodiments, the adenosine deaminase comprises mutation R455C. In some embodiments, the adenosine deaminase comprises mutation R455I. In some embodiments, the adenosine deaminase comprises mutation R455K. In some embodiments, the adenosine deaminase comprises mutation R455L. In some embodiments, the adenosine deaminase comprises mutation R455M. In some embodiments, the adenosine deaminase comprises mutation R455N. In some embodiments, the adenosine deaminase comprises mutation R455Q. In some embodiments, the adenosine deaminase comprises mutation R455F. In some embodiments, the adenosine deaminase comprises mutation R455 W. In some embodiments, the adenosine deaminase comprises mutation R455P. In some embodiments, the adenosine deaminase comprises mutation R455Y. In some embodiments, the adenosine deaminase comprises mutation R455E. In some embodiments, the adenosine deaminase comprises mutation R455D. In some embodiments, the mutations at R455 described above are further made in combination with a E488Q mutation.

[0620] In some embodiments, the adenosine deaminase comprises a mutation at isoleucine456 of the hADAR2-D amino acid sequence, or a corresponding position in a homologous ADAR protein. In some embodiments, the isoleucine residue at position 456 is replaced by a valine residue (I456V). In some embodiments, the isoleucine residue at position 456 is replaced by a leucine residue (I456L). In some embodiments, the isoleucine residue at position 456 is replaced by an aspartic acid residue (I456D).

[0621] In some embodiments, the adenosine deaminase comprises a mutation at phenylalanine457 of the hADAR2-D amino acid sequence, or a corresponding position in a homologous ADAR protein. In some embodiments, the phenylalanine residue at position 457 is replaced by a tyrosine residue (F457Y). In some embodiments, the phenylalanine residue at position 457 is replaced by an arginine residue (F457R). In some embodiments, the phenylalanine residue at position 457 is replaced by a glutamic acid residue (F457E).

[0622] In some embodiments, the adenosine deaminase comprises a mutation at serine458 of the hADAR2-D amino acid sequence, or a corresponding position in a homologous ADAR protein. In some embodiments, the serine residue at position 458 is replaced by a valine residue (S458V). In some embodiments, the serine residue at position 458 is replaced by a phenylalanine residue (S458F). In some embodiments, the serine residue at position 458 is replaced by a proline residue (S458P). In some embodiments, the adenosine deaminase comprises mutation S458I. In some embodiments, the adenosine deaminase comprises mutation S458L. In some embodiments, the adenosine deaminase comprises mutation S458M. In some embodiments, the adenosine deaminase comprises mutation S458C. In some embodiments, the adenosine deaminase comprises mutation S458A. In some embodiments, the adenosine deaminase comprises mutation S458G. In some embodiments, the adenosine deaminase comprises mutation S458T. In some embodiments, the adenosine deaminase comprises mutation S458Y. In some embodiments, the adenosine deaminase comprises mutation S458 W. In some embodiments, the adenosine deaminase comprises mutation S458Q. In some embodiments, the adenosine deaminase comprises mutation S458N. In some embodiments, the adenosine deaminase comprises mutation S458H. In some embodiments, the adenosine deaminase comprises mutation S458E. In some embodiments, the adenosine deaminase comprises mutation S458D. In some embodiments, the adenosine deaminase comprises mutation S458K. In some embodiments, the adenosine deaminase comprises mutation S458R. In some embodiments, the mutations at S458 described above are further made in combination with a E488Q mutation.

[0623] In some embodiments, the adenosine deaminase comprises a mutation at proline459 of the hADAR2-D amino acid sequence, or a corresponding position in a homologous ADAR protein. In some embodiments, the proline residue at position 459 is replaced by a cysteine residue (P459C). In some embodiments, the proline residue at position 459 is replaced by a histidine residue (P459H). In some embodiments, the proline residue at position 459 is replaced by a tryptophan residue (P459 W).

[0624] In some embodiments, the adenosine deaminase comprises a mutation at histidine460 of the hADAR2-D amino acid sequence, or a corresponding position in a homologous ADAR protein. In some embodiments, the histidine residue at position 460 is replaced by an arginine residue (H460R). In some embodiments, the histidine residue at position 460 is replaced by an isoleucine residue (H460I). In some embodiments, the histidine residue at position 460 is replaced by a proline residue (H460P). In some embodiments, the adenosine deaminase comprises mutation H460L. In some embodiments, the adenosine deaminase comprises mutation H460V. In some embodiments, the adenosine deaminase comprises mutation H460F. In some embodiments, the adenosine deaminase comprises mutation H460M. In some embodiments, the adenosine deaminase comprises mutation H460C. In some embodiments, the adenosine deaminase comprises mutation H460A. In some embodiments, the adenosine deaminase comprises mutation H460G. In some embodiments, the adenosine deaminase comprises mutation H460T. In some embodiments, the adenosine deaminase comprises mutation H460S. In some embodiments, the adenosine deaminase comprises mutation H460Y. In some embodiments, the adenosine deaminase comprises mutation H460 W. In some embodiments, the adenosine deaminase comprises mutation H460Q. In some embodiments, the adenosine deaminase comprises mutation H460N. In some embodiments, the adenosine deaminase comprises mutation H460E. In some embodiments, the adenosine deaminase comprises mutation H460D. In some embodiments, the adenosine deaminase comprises mutation H460K. In some embodiments, the mutations at H460 described above are further made in combination with a E488Q mutation.

[0625] In some embodiments, the adenosine deaminase comprises a mutation at proline462 of the hADAR2-D amino acid sequence, or a corresponding position in a homologous ADAR protein. In some embodiments, the proline residue at position 462 is replaced by a serine residue (P462S). In some embodiments, the proline residue at position 462 is replaced by a tryptophan residue (P462 W). In some embodiments, the proline residue at position 462 is replaced by a glutamic acid residue (P462E).

[0626] In some embodiments, the adenosine deaminase comprises a mutation at aspartic acid469 of the hADAR2-D amino acid sequence, or a corresponding position in a homologous ADAR protein. In some embodiments, the aspartic acid residue at position 469 is replaced by a glutamine residue (D469Q). In some embodiments, the aspartic acid residue at position 469 is replaced by a serine residue (D469S). In some embodiments, the aspartic acid residue at position 469 is replaced by a tyrosine residue (D469Y).

[0627] In some embodiments, the adenosine deaminase comprises a mutation at arginine470 of the hADAR2-D amino acid sequence, or a corresponding position in a homologous ADAR protein. In some embodiments, the arginine residue at position 470 is replaced by an alanine residue (R470A). In some embodiments, the arginine residue at position 470 is replaced by an isoleucine residue (R470I). In some embodiments, the arginine residue at position 470 is replaced by an aspartic acid residue (R470D).

[0628] In some embodiments, the adenosine deaminase comprises a mutation at histidine471 of the hADAR2-D amino acid sequence, or a corresponding position in a homologous ADAR protein. In some embodiments, the histidine residue at position 471 is replaced by a lysine residue (H471K). In some embodiments, the histidine residue at position 471 is replaced by a threonine residue (H471T). In some embodiments, the histidine residue at position 471 is replaced by a valine residue (H471V).

[0629] In some embodiments, the adenosine deaminase comprises a mutation at proline472 of the hADAR2-D amino acid sequence, or a corresponding position in a homologous ADAR protein. In some embodiments, the proline residue at position 472 is replaced by a lysine residue (P472K). In some embodiments, the proline residue at position 472 is replaced by a threonine residue (P472T). In some embodiments, the proline residue at position 472 is replaced by an aspartic acid residue (P472D).

[0630] In some embodiments, the adenosine deaminase comprises a mutation at asparagine473 of the hADAR2-D amino acid sequence, or a corresponding position in a homologous ADAR protein. In some embodiments, the asparagine residue at position 473 is replaced by an arginine residue (N473R). In some embodiments, the asparagine residue at position 473 is replaced by a tryptophan residue (N473 W). In some embodiments, the asparagine residue at position 473 is replaced by a proline residue (N473P). In some embodiments, the asparagine residue at position 473 is replaced by an aspartic acid residue (N473D).

[0631] In some embodiments, the adenosine deaminase comprises a mutation at arginine 474 of the hADAR2-D amino acid sequence, or a corresponding position in a homologous ADAR protein. In some embodiments, the arginine residue at position 474 is replaced by a lysine residue (R474K). In some embodiments, the arginine residue at position 474 is replaced by a glycine residue (R474G). In some embodiments, the arginine residue at position 474 is replaced by an aspartic acid residue (R474D). In some embodiments, the arginine residue at position 474 is replaced by a glutamic acid residue (R474E).

[0632] In some embodiments, the adenosine deaminase comprises a mutation at lysine475 of the hADAR2-D amino acid sequence, or a corresponding position in a homologous ADAR protein. In some embodiments, the lysine residue at position 475 is replaced by a glutamine residue (K475Q). In some embodiments, the lysine residue at position 475 is replaced by an asparagine residue (K475N). In some embodiments, the lysine residue at position 475 is replaced by an aspartic acid residue (K475D).

[0633] In some embodiments, the adenosine deaminase comprises a mutation at alanine476 of the hADAR2-D amino acid sequence, or a corresponding position in a homologous ADAR protein. In some embodiments, the alanine residue at position 476 is replaced by a serine residue (A476S). In some embodiments, the alanine residue at position 476 is replaced by an arginine residue (A476R). In some embodiments, the alanine residue at position 476 is replaced by a glutamic acid residue (A476E).

[0634] In some embodiments, the adenosine deaminase comprises a mutation at arginine477 of the hADAR2-D amino acid sequence, or a corresponding position in a homologous ADAR protein. In some embodiments, the arginine residue at position 477 is replaced by a lysine residue (R477K). In some embodiments, the arginine residue at position 477 is replaced by a threonine residue (R477T). In some embodiments, the arginine residue at position 477 is replaced by a phenylalanine residue (R477F). In some embodiments, the arginine residue at position 474 is replaced by a glutamic acid residue (R477E).

[0635] In some embodiments, the adenosine deaminase comprises a mutation at glycine478 of the hADAR2-D amino acid sequence, or a corresponding position in a homologous ADAR protein. In some embodiments, the glycine residue at position 478 is replaced by an alanine residue (G478A). In some embodiments, the glycine residue at position 478 is replaced by an arginine residue (G478R). In some embodiments, the glycine residue at position 478 is replaced by a tyrosine residue (G478Y). In some embodiments, the adenosine deaminase comprises mutation G478I. In some embodiments, the adenosine deaminase comprises mutation G478L. In some embodiments, the adenosine deaminase comprises mutation G478V. In some embodiments, the adenosine deaminase comprises mutation G478F. In some embodiments, the adenosine deaminase comprises mutation G478M. In some embodiments, the adenosine deaminase comprises mutation G478C. In some embodiments, the adenosine deaminase comprises mutation G478P. In some embodiments, the adenosine deaminase comprises mutation G478T. In some embodiments, the adenosine deaminase comprises mutation G478S. In some embodiments, the adenosine deaminase comprises mutation G478 W. In some embodiments, the adenosine deaminase comprises mutation G478Q. In some embodiments, the adenosine deaminase comprises mutation G478N. In some embodiments, the adenosine deaminase comprises mutation G478H. In some embodiments, the adenosine deaminase comprises mutation G478E. In some embodiments, the adenosine deaminase comprises mutation G478D. In some embodiments, the adenosine deaminase comprises mutation G478K. In some embodiments, the mutations at G478 described above are further made in combination with a E488Q mutation.

[0636] In some embodiments, the adenosine deaminase comprises a mutation at glutamine479 of the hADAR2-D amino acid sequence, or a corresponding position in a homologous ADAR protein. In some embodiments, the glutamine residue at position 479 is replaced by an asparagine residue (Q479N). In some embodiments, the glutamine residue at position 479 is replaced by a serine residue (Q479S). In some embodiments, the glutamine residue at position 479 is replaced by a proline residue (Q479P).

[0637] In some embodiments, the adenosine deaminase comprises a mutation at arginine348 of the hADAR2-D amino acid sequence, or a corresponding position in a homologous ADAR protein. In some embodiments, the arginine residue at position 348 is replaced by an alanine residue (R348A). In some embodiments, the arginine residue at position 348 is replaced by a glutamic acid residue (R348E).

[0638] In some embodiments, the adenosine deaminase comprises a mutation at valine351 of the hADAR2-D amino acid sequence, or a corresponding position in a homologous ADAR protein. In some embodiments, the valine residue at position 351 is replaced by a leucine residue (V351L). In some embodiments, the adenosine deaminase comprises mutation V351Y. In some embodiments, the adenosine deaminase comprises mutation V351M. In some embodiments, the adenosine deaminase comprises mutation V351T. In some embodiments, the adenosine deaminase comprises mutation V351G. In some embodiments, the adenosine deaminase comprises mutation V351A. In some embodiments, the adenosine deaminase comprises mutation V351F. In some embodiments, the adenosine deaminase comprises mutation V351E. In some embodiments, the adenosine deaminase comprises mutation V351I. In some embodiments, the adenosine deaminase comprises mutation V351C. In some embodiments, the adenosine deaminase comprises mutation V351H. In some embodiments, the adenosine deaminase comprises mutation V351P. In some embodiments, the adenosine deaminase comprises mutation V351S. In some embodiments, the adenosine deaminase comprises mutation V351K. In some embodiments, the adenosine deaminase comprises mutation V351N. In some embodiments, the adenosine deaminase comprises mutation V351 W. In some embodiments, the adenosine deaminase comprises mutation V351Q. In some embodiments, the adenosine deaminase comprises mutation V351D. In some embodiments, the adenosine deaminase comprises mutation V351R. In some embodiments, the mutations at V351 described above are further made in combination with a E488Q mutation.

[0639] In some embodiments, the adenosine deaminase comprises a mutation at threonine375 of the hADAR2-D amino acid sequence, or a corresponding position in a homologous ADAR protein. In some embodiments, the threonine residue at position 375 is replaced by a glycine residue (T375G). In some embodiments, the threonine residue at position 375 is replaced by a serine residue (T375S). In some embodiments, the adenosine deaminase comprises mutation T375H. In some embodiments, the adenosine deaminase comprises mutation T375Q. In some embodiments, the adenosine deaminase comprises mutation T375C. In some embodiments, the adenosine deaminase comprises mutation T375N. In some embodiments, the adenosine deaminase comprises mutation T375M. In some embodiments, the adenosine deaminase comprises mutation T375A. In some embodiments, the adenosine deaminase comprises mutation T375 W. In some embodiments, the adenosine deaminase comprises mutation T375V. In some embodiments, the adenosine deaminase comprises mutation T375R. In some embodiments, the adenosine deaminase comprises mutation T375E. In some embodiments, the adenosine deaminase comprises mutation T375K. In some embodiments, the adenosine deaminase comprises mutation T375F. In some embodiments, the adenosine deaminase comprises mutation T375I. In some embodiments, the adenosine deaminase comprises mutation T375D. In some embodiments, the adenosine deaminase comprises mutation T375P. In some embodiments, the adenosine deaminase comprises mutation T375L. In some embodiments, the adenosine deaminase comprises mutation T375Y. In some embodiments, the mutations at T375Y described above are further made in combination with an E488Q mutation.

[0640] In some embodiments, the adenosine deaminase comprises a mutation at Arg481 of the hADAR2-D amino acid sequence, or a corresponding position in a homologous ADAR protein. In some embodiments, the arginine residue at position 481 is replaced by a glutamic acid residue (R481E).

[0641] In some embodiments, the adenosine deaminase comprises a mutation at Ser486 of the hADAR2-D amino acid sequence, or a corresponding position in a homologous ADAR protein. In some embodiments, the serine residue at position 486 is replaced by a threonine residue (S486T).

[0642] In some embodiments, the adenosine deaminase comprises a mutation at Thr490 of the hADAR2-D amino acid sequence, or a corresponding position in a homologous ADAR protein. In some embodiments, the threonine residue at position 490 is replaced by an alanine residue (T490A). In some embodiments, the threonine residue at position 490 is replaced by a serine residue (T490S).

[0643] In some embodiments, the adenosine deaminase comprises a mutation at Ser495 of the hADAR2-D amino acid sequence, or a corresponding position in a homologous ADAR protein. In some embodiments, the serine residue at position 495 is replaced by a threonine residue (S495T).

[0644] In some embodiments, the adenosine deaminase comprises a mutation at Arg510 of the hADAR2-D amino acid sequence, or a corresponding position in a homologous ADAR protein. In some embodiments, the arginine residue at position 510 is replaced by a glutamine residue (R510Q). In some embodiments, the arginine residue at position 510 is replaced by an alanine residue (R510A). In some embodiments, the arginine residue at position 510 is replaced by a glutamic acid residue (R510E).

[0645] In some embodiments, the adenosine deaminase comprises a mutation at Gly593 of the hADAR2-D amino acid sequence, or a corresponding position in a homologous ADAR protein. In some embodiments, the glycine residue at position 593 is replaced by an alanine residue (G593A). In some embodiments, the glycine residue at position 593 is replaced by a glutamic acid residue (G593E).

[0646] In some embodiments, the adenosine deaminase comprises a mutation at Lys594 of the hADAR2-D amino acid sequence, or a corresponding position in a homologous ADAR protein. In some embodiments, the lysine residue at position 594 is replaced by an alanine residue (K594A).

[0647] In some embodiments, the adenosine deaminase comprises a mutation at any one or more of positions A454, R455, 1456, F457, S458, P459, H460, P462, D469, R470, H471, P472, N473, R474, K475, A476, R477, G478, Q479, R348, R510, G593, K594 of the hADAR2-D amino acid sequence, or a corresponding position in a homologous ADAR protein.

[0648] In some embodiments, the adenosine deaminase comprises any one or more of mutations A454S, A454C, A454D, R455A, R455V, R455H, I456V, I456L, I456D, F457Y, F457R, F457E, S458V, S458F, S458P, P459C, P459H, P459 W, H460R, H460, H460P, P462S, P462 W, P462E, D469Q, D469S, D469Y, R470A, R470I, R470D, H471K, H471T, H471V, P472K, P472T, P472D, N473R, N473 W, N473P, R474K, R474G, R474D, K475Q, K475N, K475D, A476S, A476R, A476E, R477K, R477T, R477F, G478A, G478R, G478Y, Q479N, Q479S, Q479P, R348A, R510Q, R510A, G593A, G593E, K594A of the hADAR2-D amino acid sequence, or a corresponding position in a homologous ADAR protein.

[0649] In certain embodiments the adenosine deaminase is mutated to convert the activity to cytidine deaminase. Accordingly in some embodiments, the adenosine deaminase comprises one or more mutations in positions selected from E396, C451, V351, R455, T375, K376, S486, Q488, R510, K594, R348, G593, S397, H443, L444, Y445, F442, E438, T448, A353, V355, T339, P539, T339, P539, V525 I520, P462 and N579. In particular embodiments, the adenosine deaminase comprises one or more mutations in a position selected from V351, L444, V355, V525 and I520. In some embodiments, the adenosine deaminase may comprise one or more of mutations at E488, V351, S486, T375, S370, P462, N597, based on amino acid sequence positions of hADAR2-D, and mutations in a homologous ADAR protein corresponding to the above.

[0650] In some embodiments, the adenosine deaminase may comprise one or more of the mutations: E488Q based on amino acid sequence positions of hADAR2-D, and mutations in a homologous ADAR protein corresponding to the above. In some embodiments, the adenosine deaminase may comprise one or more of the mutations: E488Q, V351G, based on amino acid sequence positions of hADAR2-D, and mutations in a homologous ADAR protein corresponding to the above. In some embodiments, the adenosine deaminase may comprise one or more of the mutations: E488Q, V351G, S486A, based on amino acid sequence positions of hADAR2-D, and mutations in a homologous ADAR protein corresponding to the above. In some embodiments, the adenosine deaminase may comprise one or more of the mutations: E488Q, V351G, S486A, T375S, based on amino acid sequence positions of hADAR2-D, and mutations in a homologous ADAR protein corresponding to the above. In some embodiments, the adenosine deaminase may comprise one or more of the mutations: E488Q, V351G, S486A, T375S, S370C, based on amino acid sequence positions of hADAR2-D, and mutations in a homologous ADAR protein corresponding to the above. In some embodiments, the adenosine deaminase may comprise one or more of the mutations: E488Q, V351G, S486A, T375S, S370C, P462A, based on amino acid sequence positions of hADAR2-D, and mutations in a homologous ADAR protein corresponding to the above. In some embodiments, the adenosine deaminase may comprise one or more of the mutations: E488Q, V351G, S486A, T375S, S370C, P462A, N597I, based on amino acid sequence positions of hADAR2-D, and mutations in a homologous ADAR protein corresponding to the above. In some embodiments, the adenosine deaminase may comprise one or more of the mutations: E488Q, V351G, S486A, T375S, S370C, P462A, N597I, L332I, based on amino acid sequence positions of hADAR2-D, and mutations in a homologous ADAR protein corresponding to the above. In some embodiments, the adenosine deaminase may comprise one or more of the mutations: E488Q, V351G, S486A, T375S, S370C, P462A, N597I, L332I, I398V, based on amino acid sequence positions of hADAR2-D, and mutations in a homologous ADAR protein corresponding to the above. In some embodiments, the adenosine deaminase may comprise one or more of the mutations: E488Q, V351G, S486A, T375S, S370C, P462A, N597I, L332I, I398V, K350I, based on amino acid sequence positions of hADAR2-D, and mutations in a homologous ADAR protein corresponding to the above. In some embodiments, the adenosine deaminase may comprise one or more of the mutations: E488Q, V351G, S486A, T375S, S370C, P462A, N597I, L332I, I398V, K350I, M383L, based on amino acid sequence positions of hADAR2-D, and mutations in a homologous ADAR protein corresponding to the above. In some embodiments, the adenosine deaminase may comprise one or more of the mutations: E488Q, V351G, S486A, T375S, S370C, P462A, N597I, L332I, I398V, K350I, M383L, D619G, based on amino acid sequence positions of hADAR2-D, and mutations in a homologous ADAR protein corresponding to the above. In some embodiments, the adenosine deaminase may comprise one or more of the mutations: E488Q, V351G, S486A, T375S, S370C, P462A, N597I, L332I, I398V, K350I, M383L, D619G, S582T, based on amino acid sequence positions of hADAR2-D, and mutations in a homologous ADAR protein corresponding to the above. In some embodiments, the adenosine deaminase may comprise one or more of the mutations: E488Q, V351G, S486A, T375S, S370C, P462A, N597I, L332I, I398V, K350I, M383L, D619G, S582T, V440I based on amino acid sequence positions of hADAR2-D, and mutations in a homologous ADAR protein corresponding to the above. In some embodiments, the adenosine deaminase may comprise one or more of the mutations: E488Q, V351G, S486A, T375S, S370C, P462A, N597I, L332I, I398V, K350I, M383L, D619G, S582T, V440I, S495N based on amino acid sequence positions of hADAR2-D, and mutations in a homologous ADAR protein corresponding to the above. In some embodiments, the adenosine deaminase may comprise one or more of the mutations: E488Q, V351G, S486A, T375S, S370C, P462A, N597I, L332I, I398V, K350I, M383L, D619G, S582T, V440I, S495N, K418E based on amino acid sequence positions of hADAR2-D, and mutations in a homologous ADAR protein corresponding to the above. In some embodiments, the adenosine deaminase may comprise one or more of the mutations: E488Q, V351G, S486A, T375S, S370C, P462A, N597I, L332I, I398V, K350I, M383L, D619G, S582T, V440I, S495N, K418E, S661T based on amino acid sequence positions of hADAR2-D, and mutations in a homologous ADAR protein corresponding to the above. In some examples, provided herein includes a mutated adenosine deaminase e.g., an adenosine deaminase comprising one or more mutations of E488Q, V351G, S486A, T375S, S370C, P462A, N597I, L332I, I398V, K350I, M383L, D619G, S582T, V440I, S495N, K418E, S661T, fused with a dead Cas12b protein or Cas12 nickase. In a particular example, provided herein includes a mutated adenosine deaminase e.g., an adenosine deaminase comprising E488Q, V351G, S486A, T375S, S370C, P462A, N597I, L332, 1398V, K350I, M383L, D619G, S582T, V440I, S495N, K418E, and S661T, fused with a dead Cas12b protein or a Cas12 nickase.

[0651] In some embodiments, the adenosine deaminase comprises a mutation at any one or more of positions T375, V351, G478, S458, H460 of the hADAR2-D amino acid sequence, or a corresponding position in a homologous ADAR protein, optionally in combination a mutation at E488. In some embodiments, the adenosine deaminase comprises one or more of mutations selected from T375G, T375C, T375H, T375Q, V351M, V351T, V351Y, G478R, S458F, H460I, optionally in combination with E488Q.

[0652] In some embodiments, the adenosine deaminase comprises one or more of mutations selected from T375H, T375Q, V351M, V351Y, H460P, optionally in combination with E488Q.

[0653] In some embodiments, the adenosine deaminase comprises mutations T375S and S458F, optionally in combination with E488Q.

[0654] In some embodiments, the adenosine deaminase comprises a mutation at two or more of positions T375, N473, R474, G478, S458, P459, V351, R455, R455, T490, R348, Q479 of the hADAR2-D amino acid sequence, or a corresponding position in a homologous ADAR protein, optionally in combination a mutation at E488. In some embodiments, the adenosine deaminase comprises two or more of mutations selected from T375G, T375S, N473D, R474E, G478R, S458F, P459 W, V351L, R455G, R455S, T490A, R348E, Q479P, optionally in combination with E488Q.

[0655] In some embodiments, the adenosine deaminase comprises mutations T375G and V351L. In some embodiments, the adenosine deaminase comprises mutations T375G and R455G. In some embodiments, the adenosine deaminase comprises mutations T375G and R455S. In some embodiments, the adenosine deaminase comprises mutations T375G and T490A. In some embodiments, the adenosine deaminase comprises mutations T375G and R348E. In some embodiments, the adenosine deaminase comprises mutations T375S and V351L. In some embodiments, the adenosine deaminase comprises mutations T375S and R455G. In some embodiments, the adenosine deaminase comprises mutations T375S and R455S. In some embodiments, the adenosine deaminase comprises mutations T375S and T490A. In some embodiments, the adenosine deaminase comprises mutations T375S and R348E. In some embodiments, the adenosine deaminase comprises mutations N473D and V351L. In some embodiments, the adenosine deaminase comprises mutations N473D and R455G. In some embodiments, the adenosine deaminase comprises mutations N473D and R455S. In some embodiments, the adenosine deaminase comprises mutations N473D and T490A. In some embodiments, the adenosine deaminase comprises mutations N473D and R348E. In some embodiments, the adenosine deaminase comprises mutations R474E and V351L. In some embodiments, the adenosine deaminase comprises mutations R474E and R455G. In some embodiments, the adenosine deaminase comprises mutations R474E and R455S. In some embodiments, the adenosine deaminase comprises mutations R474E and T490A. In some embodiments, the adenosine deaminase comprises mutations R474E and R348E. In some embodiments, the adenosine deaminase comprises mutations S458F and T375G. In some embodiments, the adenosine deaminase comprises mutations S458F and T375S. In some embodiments, the adenosine deaminase comprises mutations S458F and N473D. In some embodiments, the adenosine deaminase comprises mutations S458F and R474E. In some embodiments, the adenosine deaminase comprises mutations S458F and G478R. In some embodiments, the adenosine deaminase comprises mutations G478R and T375G. In some embodiments, the adenosine deaminase comprises mutations G478R and T375S. In some embodiments, the adenosine deaminase comprises mutations G478R and N473D. In some embodiments, the adenosine deaminase comprises mutations G478R and R474E. In some embodiments, the adenosine deaminase comprises mutations P459 W and T375G. In some embodiments, the adenosine deaminase comprises mutations P459 W and T375S. In some embodiments, the adenosine deaminase comprises mutations P459 W and N473D. In some embodiments, the adenosine deaminase comprises mutations P459 W and R474E. In some embodiments, the adenosine deaminase comprises mutations P459 W and G478R. In some embodiments, the adenosine deaminase comprises mutations P459 W and S458F. In some embodiments, the adenosine deaminase comprises mutations Q479P and T375G. In some embodiments, the adenosine deaminase comprises mutations Q479P and T375S. In some embodiments, the adenosine deaminase comprises mutations Q479P and N473D. In some embodiments, the adenosine deaminase comprises mutations Q479P and R474E. In some embodiments, the adenosine deaminase comprises mutations Q479P and G478R. In some embodiments, the adenosine deaminase comprises mutations Q479P and S458F. In some embodiments, the adenosine deaminase comprises mutations Q479P and P459 W. All mutations described in this paragraph may also further be made in combination with a E488Q mutations.

[0656] In some embodiments, the adenosine deaminase comprises a mutation at any one or more of positions K475, Q479, P459, G478, S458 of the hADAR2-D amino acid sequence, or a corresponding position in a homologous ADAR protein, optionally in combination a mutation at E488. In some embodiments, the adenosine deaminase comprises one or more of mutations selected from K475N, Q479N, P459 W, G478R, S458P, S458F, optionally in combination with E488Q.

[0657] In some embodiments, the adenosine deaminase comprises a mutation at any one or more of positions T375, V351, R455, H460, A476 of the hADAR2-D amino acid sequence, or a corresponding position in a homologous ADAR protein, optionally in combination a mutation at E488. In some embodiments, the adenosine deaminase comprises one or more of mutations selected from T375G, T375C, T375H, T375Q, V351M, V351T, V351Y, R455H, H460P, H460I, A476E, optionally in combination with E488Q.

[0658] In certain embodiments, improvement of editing and reduction of off-target modification is achieved by chemical modification of gRNAs. gRNAs which are chemically modified as exemplified in Vogel et al. (2014), Angew Chem Int Ed, 53:6267-6271, doi:10.1002/anie.201402634 (incorporated herein by reference in its entirety) reduce off-target activity and improve on-target efficiency. 2′-O-methyl and phosphothioate modified guide RNAs in general improve editing efficiency in cells.

[0659] ADAR has been known to demonstrate a preference for neighboring nucleotides on either side of the edited A (www.nature.com/nsmb/journal/v23/n5/full/nsmb.3203.html, Matthews et al. (2017), Nature Structural Mol Biol, 23(5): 426-433, incorporated herein by reference in its entirety). Accordingly, in certain embodiments, the gRNA, target, and/or ADAR is selected optimized for motif preference.

[0660] Intentional mismatches have been demonstrated in vitro to allow for editing of non-preferred motifs (academic.oup.com/nar/article-lookup/doi/10.1093/nar/gku272; Schneider et al (2014), Nucleic Acid Res, 42(10):e87); Fukuda et al. (2017), Scientific Reports, 7, doi:10.1038/srep41478, incorporated herein by reference in its entirety). Accordingly, in certain embodiments, to enhance RNA editing efficiency on non-preferred 5′ or 3′ neighboring bases, intentional mismatches in neighboring bases are introduced.

[0661] In some embodiments, the adenosine deaminase may be a tRNA-specific adenosine deaminase or a variant thereof. In some embodiments, the adenosine deaminase may comprise one or more of the mutations: W23L, W23R, R26G, H36L, N37S, P48S, P48T, P48A, I49V, R51L, N72D, L84F, S97C, A106V, D108N, H123Y, G125A, A142N, S146C, D147Y, R152H, R152P, E155V, I156F, K157N, K161T, based on amino acid sequence positions of E. coli TadA, and mutations in a homologous deaminase protein corresponding to the above. In some embodiments, the adenosine deaminase may comprise one or more of the mutations: D108N based on amino acid sequence positions of E. coli TadA, and mutations in a homologous deaminase protein corresponding to the above. In some embodiments, the adenosine deaminase may comprise one or more of the mutations: A106V, D108N, based on amino acid sequence positions of E. coli TadA, and mutations in a homologous deaminase protein corresponding to the above. In some embodiments, the adenosine deaminase may comprise one or more of the mutations: A106V, D108N, D147Y, E155V, based on amino acid sequence positions of E. coli TadA, and mutations in a homologous deaminase protein corresponding to the above. In some embodiments, the adenosine deaminase may comprise one or more of the mutations: A106V, D108N, based on amino acid sequence positions of E. coli TadA, and mutations in a homologous deaminase protein corresponding to the above. In some embodiments, the adenosine deaminase may comprise one or more of the mutations: A106V, D108N, D147Y, E155V, L84F, H123Y, I156F, based on amino acid sequence positions of E. coli TadA, and mutations in a homologous deaminase protein corresponding to the above. In some embodiments, the adenosine deaminase may comprise one or more of the mutations: A106V, D108N, D147Y, E155V, L84F, H123Y, I156F, A142N, based on amino acid sequence positions of E. coli TadA, and mutations in a homologous deaminase protein corresponding to the above. In some embodiments, the adenosine deaminase may comprise one or more of the mutations: A106V, D108N, D147Y, E155V, L84F, H123Y, I156F, H36L, R51L, S146C, K157N, based on amino acid sequence positions of E. coli TadA, and mutations in a homologous deaminase protein corresponding to the above. In some embodiments, the adenosine deaminase may comprise one or more of the mutations: A106V, D108N, D147Y, E155V, L84F, H123Y, I156F, H36L, R51L, S146C, K157N, P48S, based on amino acid sequence positions of E. coli TadA, and mutations in a homologous deaminase protein corresponding to the above. In some embodiments, the adenosine deaminase may comprise one or more of the mutations: A106V, D108N, D147Y, E155V, L84F, H123Y, I156F, H36L, R51L, S146C, K157N, P48S, A142N, based on amino acid sequence positions of E. coli TadA, and mutations in a homologous deaminase protein corresponding to the above. In some embodiments, the adenosine deaminase may comprise one or more of the mutations: A106V, D108N, D147Y, E155V, L84F, H123Y, I156F, H36L, R51L, S146C, K157N, P48S, W23R, P48A, based on amino acid sequence positions of E. coli TadA, and mutations in a homologous deaminase protein corresponding to the above. In some embodiments, the adenosine deaminase may comprise one or more of the mutations: A106V, D108N, D147Y, E155V, L84F, H123Y, I156F, H36L, R51L, S146C, K157N, P48S, W23R, P48A, A142N, based on amino acid sequence positions of E. coli TadA, and mutations in a homologous deaminase protein corresponding to the above. In some embodiments, the adenosine deaminase may comprise one or more of the mutations: A106V, D108N, D147Y, E155V, L84F, H123Y, I156F, H36L, R51L, S146C, K157N, P48S, W23R, P48A, R152P, based on amino acid sequence positions of E. coli TadA, and mutations in a homologous deaminase protein corresponding to the above. In some embodiments, the adenosine deaminase may comprise one or more of the mutations: A106V, D108N, D147Y, E155V, L84F, H123Y, I156F, H36L, R51L, S146C, K157N, P48S, W23R, P48A, R152P, A142N, based on amino acid sequence positions of E. coli TadA, and mutations in a homologous deaminase protein corresponding to the above.

[0662] Results suggest that A's opposite C's in the targeting window of the ADAR deaminase domain are preferentially edited over other bases. Additionally, A's base-paired with U's within a few bases of the targeted base show low levels of editing by Cas12b-ADAR fusions, suggesting that there is flexibility for the enzyme to edit multiple A's. These two observations suggest that multiple A's in the activity window of Cas12b-ADAR fusions could be specified for editing by mismatching all A's to be edited with C's. Accordingly, in certain embodiments, multiple A:C mismatches in the activity window are designed to create multiple A:I edits. In certain embodiments, to suppress potential off-target editing in the activity window, non-target A's are paired with A's or G's.

[0663] The terms “editing specificity” and “editing preference” are used interchangeably herein to refer to the extent of A-to-I editing at a particular adenosine site in a double-stranded substrate. In some embodiment, the substrate editing preference is determined by the 5′ nearest neighbor and/or the 3′ nearest neighbor of the target adenosine residue. In some embodiments, the adenosine deaminase has preference for the 5′ nearest neighbor of the substrate ranked as U>A>C>G (“>” indicates greater preference). In some embodiments, the adenosine deaminase has preference for the 3′ nearest neighbor of the substrate ranked as G>C-A>U (“>” indicates greater preference; “˜” indicates similar preference). In some embodiments, the adenosine deaminase has preference for the 3′ nearest neighbor of the substrate ranked as G>C>U-A (“>” indicates greater preference; “˜” indicates similar preference). In some embodiments, the adenosine deaminase has preference for the 3′ nearest neighbor of the substrate ranked as G>C>A>U (“>” indicates greater preference). In some embodiments, the adenosine deaminase has preference for the 3′ nearest neighbor of the substrate ranked as C-G-A>U (“>” indicates greater preference; “˜” indicates similar preference). In some embodiments, the adenosine deaminase has preference for a triplet sequence containing the target adenosine residue ranked as TAG>AAG>CAC>AAT>GAA>GAC (“>” indicates greater preference), the center A being the target adenosine residue.

[0664] In some embodiments, the substrate editing preference of an adenosine deaminase is affected by the presence or absence of a nucleic acid binding domain in the adenosine deaminase protein. In some embodiments, to modify substrate editing preference, the deaminase domain is connected with a double-strand RNA binding domain (dsRBD) or a double-strand RNA binding motif (dsRBM). In some embodiments, the dsRBD or dsRBM may be derived from an ADAR protein, such as hADAR1 or hADAR2. In some embodiments, a full length ADAR protein that comprises at least one dsRBD and a deaminase domain is used. In some embodiments, the one or more dsRBM or dsRBD is at the N-terminus of the deaminase domain. In other embodiments, the one or more dsRBM or dsRBD is at the C-terminus of the deaminase domain.

[0665] In some embodiments, the substrate editing preference of an adenosine deaminase is affected by amino acid residues near or in the active center of the enzyme. In some embodiments, to modify substrate editing preference, the adenosine deaminase may comprise one or more of the mutations: G336D, G487R, G487K, G487 W, G487Y, E488Q, E488N, T490A, V493A, V493T, V493S, N597K, N597R, A589V, S599T, N613K, N613R, based on amino acid sequence positions of hADAR2-D, and mutations in a homologous ADAR protein corresponding to the above.

[0666] Particularly, in some embodiments, to reduce editing specificity, the adenosine deaminase can comprise one or more of mutations E488Q, V493A, N597K, N613K, based on amino acid sequence positions of hADAR2-D, and mutations in a homologous ADAR protein corresponding to the above. In some embodiments, to increase editing specificity, the adenosine deaminase can comprise mutation T490A.

[0667] In some embodiments, to increase editing preference for target adenosine (A) with an immediate 5′ G, such as substrates comprising the triplet sequence GAC, the center A being the target adenosine residue, the adenosine deaminase can comprise one or more of mutations G336D, E488Q, E488N, V493T, V493S, V493A, A589V, N597K, N597R, S599T, N613K, N613R, based on amino acid sequence positions of hADAR2-D, and mutations in a homologous ADAR protein corresponding to the above.

[0668] Particularly, in some embodiments, the adenosine deaminase comprises mutation E488Q or a corresponding mutation in a homologous ADAR protein for editing substrates comprising the following triplet sequences: GAC, GAA, GAU, GAG, CAU, AAU, UAC, the center A being the target adenosine residue.

[0669] In some embodiments, the adenosine deaminase comprises the wild-type amino acid sequence of hADAR1-D. In some embodiments, the adenosine deaminase comprises one or more mutations in the hADAR1-D sequence, such that the editing efficiency, and/or substrate editing preference of hADAR1-D is changed according to specific needs.

[0670] In some embodiments, the adenosine deaminase comprises a mutation at Glycine1007 of the hADAR1-D amino acid sequence, or a corresponding position in a homologous ADAR protein. In some embodiments, the glycine residue at position 1007 is replaced by a non-polar amino acid residue with relatively small side chains. For example, in some embodiments, the glycine residue at position 1007 is replaced by an alanine residue (G1007A). In some embodiments, the glycine residue at position 1007 is replaced by a valine residue (G1007V). In some embodiments, the glycine residue at position 1007 is replaced by an amino acid residue with relatively large side chains. In some embodiments, the glycine residue at position 1007 is replaced by an arginine residue (G1007R). In some embodiments, the glycine residue at position 1007 is replaced by a lysine residue (G1007K). In some embodiments, the glycine residue at position 1007 is replaced by a tryptophan residue (G1007 W). In some embodiments, the glycine residue at position 1007 is replaced by a tyrosine residue (G1007Y). Additionally, in other embodiments, the glycine residue at position 1007 is replaced by a leucine residue (G1007L). In other embodiments, the glycine residue at position 1007 is replaced by a threonine residue (G1007T). In other embodiments, the glycine residue at position 1007 is replaced by a serine residue (G1007S).

[0671] In some embodiments, the adenosine deaminase comprises a mutation at glutamic acid1008 of the hADAR1-D amino acid sequence, or a corresponding position in a homologous ADAR protein. In some embodiments, the glutamic acid residue at position 1008 is replaced by a polar amino acid residue having a relatively large side chain. In some embodiments, the glutamic acid residue at position 1008 is replaced by a glutamine residue (E1008Q). In some embodiments, the glutamic acid residue at position 1008 is replaced by a histidine residue (E1008H). In some embodiments, the glutamic acid residue at position 1008 is replaced by an arginine residue (E1008R). In some embodiments, the glutamic acid residue at position 1008 is replaced by a lysine residue (E1008K). In some embodiments, the glutamic acid residue at position 1008 is replaced by a nonpolar or small polar amino acid residue. In some embodiments, the glutamic acid residue at position 1008 is replaced by a phenylalanine residue (E1008F). In some embodiments, the glutamic acid residue at position 1008 is replaced by a tryptophan residue (E1008 W). In some embodiments, the glutamic acid residue at position 1008 is replaced by a glycine residue (E1008G). In some embodiments, the glutamic acid residue at position 1008 is replaced by an isoleucine residue (E1008I). In some embodiments, the glutamic acid residue at position 1008 is replaced by a valine residue (E1008V). In some embodiments, the glutamic acid residue at position 1008 is replaced by a proline residue (E1008P). In some embodiments, the glutamic acid residue at position 1008 is replaced by a serine residue (E1008S). In other embodiments, the glutamic acid residue at position 1008 is replaced by an asparagine residue (E1008N). In other embodiments, the glutamic acid residue at position 1008 is replaced by an alanine residue (E1008A). In other embodiments, the glutamic acid residue at position 1008 is replaced by a Methionine residue (E1008M). In some embodiments, the glutamic acid residue at position 1008 is replaced by a leucine residue (E1008L).

[0672] In some embodiments, to improve editing efficiency, the adenosine deaminase may comprise one or more of the mutations: E1007S, E1007A, E1007V, E1008Q, E1008R, E1008H, E1008M, E1008N, E1008K, based on amino acid sequence positions of hADAR1-D, and mutations in a homologous ADAR protein corresponding to the above.

[0673] In some embodiments, to reduce editing efficiency, the adenosine deaminase may comprise one or more of the mutations: E1007R, E1007K, E1007Y, E1007L, E1007T, E1008G, E1008, E1008P, E1008V, E1008F, E1008 W, E1008S, E1008N, E1008K, based on amino acid sequence positions of hADAR1-D, and mutations in a homologous ADAR protein corresponding to the above.

[0674] In some embodiments, the substrate editing preference, efficiency and/or selectivity of an adenosine deaminase is affected by amino acid residues near or in the active center of the enzyme. In some embodiments, the adenosine deaminase comprises a mutation at the glutamic acid 1008 position in hADAR1-D sequence, or a corresponding position in a homologous ADAR protein. In some embodiments, the mutation is E1008R, or a corresponding mutation in a homologous ADAR protein. In some embodiments, the E1008R mutant has an increased editing efficiency for target adenosine residue that has a mismatched G residue on the opposite strand.

[0675] In some embodiments, the adenosine deaminase protein further comprises or is connected to one or more double-stranded RNA (dsRNA) binding motifs (dsRBMs) or domains (dsRBDs) for recognizing and binding to double-stranded nucleic acid substrates. In some embodiments, the interaction between the adenosine deaminase and the double-stranded substrate is mediated by one or more additional protein factor(s), including a CRISPR/CAS protein factor. In some embodiments, the interaction between the adenosine deaminase and the double-stranded substrate is further mediated by one or more nucleic acid component(s), including a guide RNA.

[0676] Modified Adenosine Deaminase Having C to U Deamination Activity

[0677] In certain example embodiments, directed evolution may be used to design modified ADAR proteins capable of catalyzing additional reactions besides deamination of an adenine to a hypoxanthine. For example, the modified ADAR protein may be capable of catalyzing deamination of a cytidine to a uracil. While not bound by a particular theory, mutations that improve C to U activity may alter the shape of the binding pocket to be more amenable to the smaller cytidine base.

[0678] In some embodiments, the modified adenosine deaminase having C-to-U deamination activity comprises a mutation at any one or more of positions V351, T375, R455, and E488 of the hADAR2-D amino acid sequence, or a corresponding position in a homologous ADAR protein. In some embodiments, the adenosine deaminase comprises mutation E488Q. In some embodiments, the adenosine deaminase comprises one or more of mutations selected from V351I, V351L, V351F, V351M, V351C, V351A, V351G, V351P, V351T, V351S, V351Y, V351 W, V351Q, V351N, V351H, V351E, V351D, V351K, V351R, T375I, T375L, T375V, T375F, T375M, T375C, T375A, T375G, T375P, T375S, T375Y, T375 W, T375Q, T375N, T375H, T375E, T375D, T375K, T375R, R455I, R455L, R455V, R455F, R455M, R455C, R455A, R455G, R455P, R455T, R455S, R455Y, R455 W, R455Q, R455N, R455H, R455E, R455D, R455K. In some embodiments, the adenosine deaminase comprises mutation E488Q, and further comprises one or more of mutations selected from V351I, V351L, V351F, V351M, V351C, V351A, V351G, V351P, V351T, V351S, V351Y, V351 W, V351Q, V351N, V351H, V351E, V351D, V351K, V351R, T375I, T375L, T375V, T375F, T375M, T375C, T375A, T375G, T375P, T375S, T375Y, T375 W, T375Q, T375N, T375H, T375E, T375D, T375K, T375R, R455I, R455L, R455V, R455F, R455M, R455C, R455A, R455G, R455P, R455T, R455S, R455Y, R455 W, R455Q, R455N, R455H, R455E, R455D, R455K.

[0679] In connection with the aforementioned modified ADAR protein having C-to-U deamination activity, the invention described herein also relates to a method for deaminating a C in a target RNA sequence of interest, comprising delivering to a target RNA or DNA an AD-functionalized composition disclosed herein.

[0680] In certain example embodiments, the method for deaminating a C in a target RNA sequence comprising delivering to said target RNA: (a) a catalytically inactive (dead) Cas; (b) a guide molecule which comprises a guide sequence linked to a direct repeat sequence; and (c) a modified ADAR protein having C-to-U deamination activity or catalytic domain thereof, wherein said modified ADAR protein or catalytic domain thereof is covalently or non-covalently linked to said dead Cas protein or said guide molecule or is adapted to link thereto after delivery; wherein guide molecule forms a complex with said dead Cas protein and directs said complex to bind said target RNA sequence of interest; wherein said guide sequence is capable of hybridizing with a target sequence comprising said C to form an RNA duplex; wherein, optionally, said guide sequence comprises a non-pairing A or U at a position corresponding to said C resulting in a mismatch in the RNA duplex formed; and wherein said modified ADAR protein or catalytic domain thereof deaminates said C in said RNA duplex.

[0681] In connection with the aforementioned modified ADAR protein having C-to-U deamination activity, the invention described herein further relates to an engineered, non-naturally occurring system suitable for deaminating a C in a target locus of interest, comprising: (a) a guide molecule which comprises a guide sequence linked to a direct repeat sequence, or a nucleotide sequence encoding said guide molecule; (b) a catalytically inactive Cas13 protein, or a nucleotide sequence encoding said catalytically inactive Cas13 protein; (c) a modified ADAR protein having C-to-U deamination activity or catalytic domain thereof, or a nucleotide sequence encoding said modified ADAR protein or catalytic domain thereof; wherein said modified ADAR protein or catalytic domain thereof is covalently or non-covalently linked to said Cas13 protein or said guide molecule or is adapted to link thereto after delivery; wherein said guide sequence is capable of hybridizing with a target RNA sequence comprising a C to form an RNA duplex; wherein, optionally, said guide sequence comprises a non-pairing A or U at a position corresponding to said C resulting in a mismatch in the RNA duplex formed; wherein, optionally, the system is a vector system comprising one or more vectors comprising: (a) a first regulatory element operably linked to a nucleotide sequence encoding said guide molecule which comprises said guide sequence, (b) a second regulatory element operably linked to a nucleotide sequence encoding said catalytically inactive Cas13 protein; and (c) a nucleotide sequence encoding a modified ADAR protein having C-to-U deamination activity or catalytic domain thereof which is under control of said first or second regulatory element or operably linked to a third regulatory element; wherein, if said nucleotide sequence encoding a modified ADAR protein or catalytic domain thereof is operably linked to a third regulatory element, said modified ADAR protein or catalytic domain thereof is adapted to link to said guide molecule or said Cas13 protein after expression; wherein components (a), (b) and (c) are located on the same or different vectors of the system, optionally wherein said first, second, and/or third regulatory element is an inducible promoter.

[0682] In an embodiment of the invention, the substrate of the adenosine deaminase is an RNA/DNA heteroduplex formed upon binding of the guide molecule to its DNA target which then forms the CRISPR-Cas complex with the CRISPR-Cas enzyme. The RNA/DNA or DNA/RNA heteroduplex is also referred to herein as the “RNA/DNA hybrid”, “DNA/RNA hybrid” or “double-stranded substrate”.

[0683] According to the present invention, the substrate of the adenosine deaminase is an RNA/DNAn RNA duplex formed upon binding of the guide molecule to its DNA target which then forms the CRISPR-Cas complex with the CRISPR-Cas enzyme. The substrate of the adenosine deaminase can also be an RNA/RNA duplex formed upon binding of the guide molecule to its RNA target which then forms the CRISPR-Cas complex with the CRISPR-Cas enzyme. The RNA/DNA or DNA/RNAn RNA duplex is also referred to herein as the “RNA/DNA hybrid”, “DNA/RNA hybrid” or “double-stranded substrate”. The particular features of the guide molecule and CRISPR-Cas enzyme are detailed below.

[0684] The term “editing selectivity” as used herein refers to the fraction of all sites on a double-stranded substrate that is edited by an adenosine deaminase. Without being bound by theory, it is contemplated that editing selectivity of an adenosine deaminase is affected by the double-stranded substrate's length and secondary structures, such as the presence of mismatched bases, bulges and/or internal loops.

[0685] In some embodiments, when the substrate is a perfectly base-paired duplex longer than 50 bp, the adenosine deaminase may be able to deaminate multiple adenosine residues within the duplex (e.g., 50% of all adenosine residues). In some embodiments, when the substrate is shorter than 50 bp, the editing selectivity of an adenosine deaminase is affected by the presence of a mismatch at the target adenosine site. Particularly, in some embodiments, adenosine (A) residue having a mismatched cytidine (C) residue on the opposite strand is deaminated with high efficiency. In some embodiments, adenosine (A) residue having a mismatched guanosine (G) residue on the opposite strand is skipped without editing.

[0686] In particular embodiments, the adenosine deaminase protein or catalytic domain thereof is delivered to the cell or expressed within the cell as a separate protein, but is modified so as to be able to link to either the C2c protein or the guide molecule. In particular embodiments, this is ensured by the use of orthogonal RNA-binding protein or adaptor protein/aptamer combinations that exist within the diversity of bacteriophage coat proteins. Examples of such coat proteins include but are not limited to: MS2, Qβ, F2, GA, fr, JP501, M12, R17, BZ13, JP34, JP500, KU1, M11, MX1, TW18, VK, SP, FI, ID2, NL95, TW19, AP205, ϕCb5, ϕCb8r, ϕCb2r, ϕCb23r, 7s and PRR1. Aptamers can be naturally occurring or synthetic oligonucleotides that have been engineered through repeated rounds of in vitro selection or SELEX (systematic evolution of ligands by exponential enrichment) to bind to a specific target.

[0687] In particular embodiments, the guide molecule is provided with one or more distinct RNA loop(s) or distinct sequence(s) that can recruit an adaptor protein. A guide molecule may be extended, without colliding with the C2c1 protein by the insertion of distinct RNA loop(s) or distinct sequence(s) that may recruit adaptor proteins that can bind to the distinct RNA loop(s) or distinct sequence(s). Examples of modified guides and their use in recruiting effector domains to the C2c1 complex are provided in Konermann (Nature 2015, 517(7536): 583-588). In particular embodiments, the aptamer is a minimal hairpin aptamer which selectively binds dimerized MS2 bacteriophage coat proteins in mammalian cells and is introduced into the guide molecule, such as in the stemloop and/or in a tetraloop. In these embodiments, the adenosine deaminase protein is fused to MS2. The adenosine deaminase protein is then co-delivered together with the C2c1 protein and corresponding guide RNA.

[0688] In some embodiments, the C2c1-ADAR base editing system described herein comprises (a) a C2c1 protein, which is catalytically inactive or a nickase; (b) a guide molecule which comprises a guide sequence; and (c) an adenosine deaminase protein or catalytic domain thereof; wherein the adenosine deaminase protein or catalytic domain thereof is covalently or non-covalently linked to the C2c1 protein or the guide molecule or is adapted to link thereto after delivery; wherein the guide sequence is substantially complementary to the target sequence but comprises a non-pairing C corresponding to the A being targeted for deamination, resulting in a A-C mismatch in a DNA-RNA or RNA-RNA duplex formed by the guide sequence and the target sequence. For application in eukaryotic cells, the C2c1 protein and/or the adenosine deaminase are preferably NLS-tagged.

[0689] In some embodiments, the components (a), (b) and (c) are delivered to the cell as a ribonucleoprotein complex. The ribonucleoprotein complex can be delivered via one or more lipid nanoparticles.

[0690] In some embodiments, the components (a), (b) and (c) are delivered to the cell as one or more RNA molecules, such as one or more guide RNAs and one or more mRNA molecules encoding the C2c1 protein, the adenosine deaminase protein, and optionally the adaptor protein. The RNA molecules can be delivered via one or more lipid nanoparticles.

[0691] In some embodiments, the components (a), (b) and (c) are delivered to the cell as one or more DNA molecules. In some embodiments, the one or more DNA molecules are comprised within one or more vectors such as viral vectors (e.g., AAV). In some embodiments, the one or more DNA molecules comprise one or more regulatory elements operably configured to express the C2c1 protein, the guide molecule, and the adenosine deaminase protein or catalytic domain thereof, optionally wherein the one or more regulatory elements comprise inducible promoters.

[0692] In some embodiments of the guide molecule is capable of hybridizing with a target sequence comprising the Adenine to be deaminated within a first DNA strand or a RNA strand at the target locus to form a DNA-RNA or RNA-RNA duplex which comprises a non-pairing Cytosine opposite to said Adenine. Upon duplex formation, the guide molecule forms a complex with the C2c1 protein and directs the complex to bind said first DNA strand or said RNA strand at the target locus of interest. Details on the aspect of the guide of the C2c1-ADAR base editing system are provided herein below.

[0693] In some embodiments, a C2c1 guide RNA having a canonical length (e.g., about 20 nt for AacC2c1) is used to form a DNA-RNA or RNA-RNA duplex with the target DNA or RNA. In some embodiments, a C2c1 guide molecule longer than the canonical length (e.g., >20 nt for AacC2c1) is used to form a DNA-RNA or RNA-RNA duplex with the target DNA or RNA including outside of the C2c1-guide RNA-target DNA complex. In certain example embodiments, the guide sequence has a length of about 29-53 nt capable of forming a DNA-RNA or RNA-RNA duplex with said target sequence. In certain other example embodiments, the guide sequence has a length of about 40-50 nt capable of forming a DNA-RNA or RNA-RNA duplex with said target sequence. In certain example embodiments, the distance between said non-pairing C and the 5′ end of said guide sequence is 20-30 nucleotides. In certain example embodiments, the distance between said non-pairing C and the 3′ end of said guide sequence is 20-30 nucleotides.

[0694] In at least a first design, the C2c1-ADAR system comprises (a) an adenosine deaminase fused or linked to a C2c1 protein, wherein the C2c1 protein is catalytically inactive or a nickase, and (b) a guide molecule comprising a guide sequence designed to introduce a A-C mismatch in a DNA-RNA or RNA-RNA duplex formed between the guide sequence and the target sequence. In some embodiments, the C2c1 protein and/or the adenosine deaminase are NLS-tagged, on either the N- or C-terminus or both.

[0695] In at least a second design, the C2c1-ADAR system comprises (a) a C2c1 protein that is catalytically inactive or a nickase, (b) a guide molecule comprising a guide sequence designed to introduce a A-C mismatch in a DNA-RNA or RNA-RNA duplex formed between the guide sequence and the target sequence, and an aptamer sequence (e.g., MS2 RNA motif or PP7 RNA motif) capable of binding to an adaptor protein (e.g., MS2 coating protein or PP7 coat protein), and (c) an adenosine deaminase fused or linked to an adaptor protein, wherein the binding of the aptamer and the adaptor protein recruits the adenosine deaminase to the DNA-RNA or RNA-RNA duplex formed between the guide sequence and the target sequence for targeted deamination at the A of the A-C mismatch. In some embodiments, the adaptor protein and/or the adenosine deaminase are NLS-tagged, on either the N- or C-terminus or both. The C2c1 protein can also be NLS-tagged.

[0696] The use of different aptamers and corresponding adaptor proteins also allows orthogonal gene editing to be implemented. In one example in which adenosine deaminase are used in combination with cytidine deaminase for orthogonal gene editing/deamination, sgRNA targeting different loci are modified with distinct RNA loops in order to recruit MS2-adenosine deaminase and PP7-cytidine deaminase (or PP7-adenosine deaminase and MS2-cytidine deaminase), respectively, resulting in orthogonal deamination of A or C at the target loci of interested, respectively. PP7 is the RNA-binding coat protein of the bacteriophage Pseudomonas. Like MS2, it binds a specific RNA sequence and secondary structure. The PP7 RNA-recognition motif is distinct from that of MS2. Consequently, PP7 and MS2 can be multiplexed to mediate distinct effects at different genomic loci simultaneously. For example, an sgRNA targeting locus A can be modified with MS2 loops, recruiting MS2-adenosine deaminase, while another sgRNA targeting locus B can be modified with PP7 loops, recruiting PP7-cytidine deaminase. In the same cell, orthogonal, locus-specific modifications are thus realized. This principle can be extended to incorporate other orthogonal RNA-binding proteins.

[0697] In at least a third design, the C2c1-ADAR CRISPR system comprises (a) an adenosine deaminase inserted into an internal loop or unstructured region of a C2c1 protein, wherein the C2c1 protein is catalytically inactive or a nickase, and (b) a guide molecule comprising a guide sequence designed to introduce a A-C mismatch in a DNA-RNA or RNA-RNA duplex formed between the guide sequence and the target sequence.

[0698] C2c1 protein split sites that are suitable for insertion of adenosine deaminase can be identified with the help of a crystal structure. For example, with respect to AacC2c1 mutants, it should be readily apparent what the corresponding position for, for example, a sequence alignment. For other C2c1 protein one can use the crystal structure of an ortholog if a relatively high degree of homology exists between the ortholog and the intended C2c1 protein.

[0699] The split position may be located within a region or loop. Preferably, the split position occurs where an interruption of the amino acid sequence does not result in the partial or full destruction of a structural feature (e.g. alpha-helixes or β-sheets). Unstructured regions (regions that did not show up in the crystal structure because these regions are not structured enough to be “frozen” in a crystal) are often preferred options. Splits in all unstructured regions that are exposed on the surface of C2c1 are envisioned in the practice of the invention. The positions within the unstructured regions or outside loops may not need to be exactly the numbers provided above, but may vary by, for example 1, 2, 3, 4, 5, 6, 7, 8, 9, or even 10 amino acids either side of the position given above, depending on the size of the loop, so long as the split position still falls within an unstructured region of outside loop.

[0700] The C2c1-ADAR system described herein can be used to target a specific Adenine within a DNA sequence for deamination. For example, the guide molecule can form a complex with the C2c1 protein and directs the complex to bind a target sequence at the target locus of interest. Because the guide sequence is designed to have a non-pairing C, the heteroduplex formed between the guide sequence and the target sequence comprises a A-C mismatch, which directs the adenosine deaminase to contact and deaminate the A opposite to the non-pairing C, converting it to a Inosine (I). Since Inosine (I) base pairs with C and functions like G in cellular process, the targeted deamination of A described herein are useful for correction of undesirable G-A and C-T mutations, as well as for obtaining desirable A-G and T-C mutations.

### Base Excision Repair Inhibitor

[0701] In some embodiments, the AD-functionalized CRISPR system further comprises a base excision repair (BER) inhibitor. Without wishing to be bound by any particular theory, cellular DNA-repair response to the presence of I:T pairing may be responsible for a decrease in nucleobase editing efficiency in cells. Alkyladenine DNA glycosylase (also known as DNA-3-methyladenine glycosylase, 3-alkyladenine DNA glycosylase, or N-methylpurine DNA glycosylase) catalyzes removal of hypoxanthine from DNA in cells, which may initiate base excision repair, with reversion of the I:T pair to a A:T pair as outcome.

[0702] In some embodiments, the BER inhibitor is an inhibitor of alkyladenine DNA glycosylase. In some embodiments, the BER inhibitor is an inhibitor of human alkyladenine DNA glycosylase. In some embodiments, the BER inhibitor is a polypeptide inhibitor. In some embodiments, the BER inhibitor is a protein that binds hypoxanthine. In some embodiments, the BER inhibitor is a protein that binds hypoxanthine in DNA. In some embodiments, the BER inhibitor is a catalytically inactive alkyladenine DNA glycosylase protein or binding domain thereof. In some embodiments, the BER inhibitor is a catalytically inactive alkyladenine DNA glycosylase protein or binding domain thereof that does not excise hypoxanthine from the DNA. Other proteins that are capable of inhibiting (e.g., sterically blocking) an alkyladenine DNA glycosylase base-excision repair enzyme are within the scope of this disclosure. Additionally, any proteins that block or inhibit base-excision repair as also within the scope of this disclosure.

[0703] Without wishing to be bound by any particular theory, base excision repair may be inhibited by molecules that bind the edited strand, block the edited base, inhibit alkyladenine DNA glycosylase, inhibit base excision repair, protect the edited base, and/or promote fixing of the non-edited strand. It is believed that the use of the BER inhibitor described herein can increase the editing efficiency of an adenosine deaminase that is capable of catalyzing a A to I change.

[0704] Accordingly, in the first design of the AD-functionalized CRISPR system discussed above, the CRISPR-Cas protein or the adenosine deaminase can be fused to or linked to a BER inhibitor (e.g., an inhibitor of alkyladenine DNA glycosylase). In some embodiments, the BER inhibitor can be comprised in one of the following structures (nC2c1=C2c1 nickase; dC2c1=dead C2c1): [AD]-[optional linker]-[nC2c1/dC2c1]-[optional linker]-[BER inhibitor]; [AD]-[optional linker]-[BER inhibitor]-[optional linker]-[nC2c1/dC2c1]; [BER inhibitor]-[optional linker]-[AD]-[optional linker]-[nC2c1/dC2c1]; [BER inhibitor]-[optional linker]-[nC2c1/dC2c1]-[optional linker]-[AD]; [nC2c1/dC2c1]-[optional linker]-[AD]-[optional linker]-[BER inhibitor]; [nC2c1/dC2c1]-[optional linker]-[BER inhibitor]-[optional linker]-[AD].

[0705] Similarly, in the second design of the AD-functionalized CRISPR system discussed above, the CRISPR-Cas protein, the adenosine deaminase, or the adaptor protein can be fused to or linked to a BER inhibitor (e.g., an inhibitor of alkyladenine DNA glycosylase). In some embodiments, the BER inhibitor can be comprised in one of the following structures (nC2c1=C2c1 nickase; dC2c1=dead C2c1): [nC2c1/dC2c1]-[optional linker]-[BER inhibitor]; [BER inhibitor]-[optional linker]-[nC2c1/dC2c1]; [AD]-[optional linker]-[Adaptor]-[optional linker]-[BER inhibitor]; [AD]-[optional linker]-[BER inhibitor]-[optional linker]-[Adaptor]; [BER inhibitor]-[optional linker]-[AD]-[optional linker]-[Adaptor]; [BER inhibitor]-[optional linker]-[Adaptor]-[optional linker]-[AD]; [Adaptor]-[optional linker]-[AD]-[optional linker]-[BER inhibitor]; [Adaptor]-[optional linker]-[BER inhibitor]-[optional linker]-[AD].

[0706] In the third design of the AD-functionalized CRISPR system discussed above, the BER inhibitor can be inserted into an internal loop or unstructured region of a CRISPR-Cas protein.

### Cytidine Deaminase

[0707] In some embodiments, the deaminase is a cytidine deaminase. The term “cytidine deaminase” or “cytidine deaminase protein” as used herein refers to a protein, a polypeptide, or one or more functional domain(s) of a protein or a polypeptide that is capable of catalyzing a hydrolytic deamination reaction that converts an cytosine (or an cytosine moiety of a molecule) to an uracil (or a uracil moiety of a molecule), as shown below. In some embodiments, the cytosine-containing molecule is an cytidine (C), and the uracil-containing molecule is an uridine (U). The cytosine-containing molecule can be deoxyribonucleic acid (DNA) or ribonucleic acid (RNA).

[chemical structure]

[0708] According to the present disclosure, cytidine deaminases that can be used in connection with the present disclosure include, but are not limited to, members of the enzyme family known as apolipoprotein B mRNA-editing complex (APOBEC) family deaminase, an activation-induced deaminase (AID), or a cytidine deaminase 1 (CDA1). In particular embodiments, the deaminase in an APOBEC1 deaminase, an APOBEC2 deaminase, an APOBEC3A deaminase, an APOBEC3B deaminase, an APOBEC3C deaminase, and APOBEC3D deaminase, an APOBEC3E deaminase, an APOBEC3F deaminase an APOBEC3G deaminase, an APOBEC3H deaminase, or an APOBEC4 deaminase.

[0709] In the methods and systems of the present invention, the cytidine deaminase is capable of targeting Cytosine in a DNA single strand. In certain example embodiments the cytidine deaminase may edit on a single strand present outside of the binding component e.g. bound Cas13. In other example embodiments, the cytidine deaminase may edit at a localized bubble, such as a localized bubble formed by a mismatch at the target edit site but the guide sequence. In certain example embodiments the cytidine deaminase may contain mutations that help focus activity such as those disclosed in Kim et al., Nature Biotechnology (2017) 35(4):371-377 (doi:10.1038/nbt.3803.

[0710] In some embodiments, the cytidine deaminase is derived from one or more metazoa species, including but not limited to, mammals, birds, frogs, squids, fish, flies and worms. In some embodiments, the cytidine deaminase is a human, primate, cow, dog rat or mouse cytidine deaminase.

[0711] In some embodiments, the cytidine deaminase is a human APOBEC, including hAPOBEC1 or hAPOBEC3. In some embodiments, the cytidine deaminase is a human AID.

[0712] In some embodiments, the cytidine deaminase protein recognizes and converts one or more target cytosine residue(s) in a single-stranded bubble of a RNA duplex into uracil residues (s). In some embodiments, the cytidine deaminase protein recognizes a binding window on the single-stranded bubble of a RNA duplex. In some embodiments, the binding window contains at least one target cytosine residue(s). In some embodiments, the binding window is in the range of about 3 bp to about 100 bp. In some embodiments, the binding window is in the range of about 5 bp to about 50 bp. In some embodiments, the binding window is in the range of about 10 bp to about 30 bp. In some embodiments, the binding window is about 1 bp, 2 bp, 3 bp, 5 bp, 7 bp, 10 bp, 15 bp, 20 bp, 25 bp, 30 bp, 40 bp, 45 bp, 50 bp, 55 bp, 60 bp, 65 bp, 70 bp, 75 bp, 80 bp, 85 bp, 90 bp, 95 bp, or 100 bp.

[0713] In some embodiments, the cytidine deaminase protein comprises one or more deaminase domains. Not intended to be bound by theory, it is contemplated that the deaminase domain functions to recognize and convert one or more target cytosine (C) residue(s) contained in a single-stranded bubble of a RNA duplex into (an) uracil (U) residue (s). In some embodiments, the deaminase domain comprises an active center. In some embodiments, the active center comprises a zinc ion. In some embodiments, amino acid residues in or near the active center interact with one or more nucleotide(s) 5′ to a target cytosine residue. In some embodiments, amino acid residues in or near the active center interact with one or more nucleotide(s) 3′ to a target cytosine residue.

[0714] In some embodiments, the cytidine deaminase comprises human APOBEC1 full protein (hAPOBEC1) or the deaminase domain thereof (hAPOBEC1-D) or a C-terminally truncated version thereof (hAPOBEC-T). In some embodiments, the cytidine deaminase is an APOBEC family member that is homologous to hAPOBEC1, hAPOBEC-D or hAPOBEC-T. In some embodiments, the cytidine deaminase comprises human AID1 full protein (hAID) or the deaminase domain thereof (hAID-D) or a C-terminally truncated version thereof (hAID-T). In some embodiments, the cytidine deaminase is an AID family member that is homologous to hAID, hAID-D or hAID-T. In some embodiments, the hAID-T is a hAID which is C-terminally truncated by about 20 amino acids.

[0715] In some embodiments, the cytidine deaminase comprises the wild-type amino acid sequence of a cytosine deaminase. In some embodiments, the cytidine deaminase comprises one or more mutations in the cytosine deaminase sequence, such that the editing efficiency, and/or substrate editing preference of the cytosine deaminase is changed according to specific needs.

[0716] Certain mutations of APOBEC1 and APOBEC3 proteins have been described in Kim et al., Nature Biotechnology (2017) 35(4):371-377 (doi:10.1038/nbt.3803); and Harris et al. Mol. Cell (2002) 10:1247-1253, each of which is incorporated herein by reference in its entirety.

[0717] In some embodiments, the cytidine deaminase is an APOBEC1 deaminase comprising one or more mutations at amino acid positions corresponding to W90, R118, H121, H122, R126, or R132 in rat APOBEC1, or an APOBEC3G deaminase comprising one or more mutations at amino acid positions corresponding to W285, R313, D316, D317X, R320, or R326 in human APOBEC3G.

[0718] In some embodiments, the cytidine deaminase comprises a mutation at tryptophane90 of the rat APOBEC1 amino acid sequence, or a corresponding position in a homologous APOBEC protein, such as tryptophane285 of APOBEC3G. In some embodiments, the tryptophan residue at position 90 is replaced by an tyrosine or phenylalanine residue (W90Y or W90F).

[0719] In some embodiments, the cytidine deaminase comprises a mutation at Arginine118 of the rat APOBEC1 amino acid sequence, or a corresponding position in a homologous APOBEC protein. In some embodiments, the arginine residue at position 118 is replaced by an alanine residue (R118A).

[0720] In some embodiments, the cytidine deaminase comprises a mutation at Histidine121 of the rat APOBEC1 amino acid sequence, or a corresponding position in a homologous APOBEC protein. In some embodiments, the histidine residue at position 121 is replaced by an arginine residue (H121R).

[0721] In some embodiments, the cytidine deaminase comprises a mutation at Histidine122 of the rat APOBEC1 amino acid sequence, or a corresponding position in a homologous APOBEC protein. In some embodiments, the histidine residue at position 122 is replaced by an arginine residue (H122R).

[0722] In some embodiments, the cytidine deaminase comprises a mutation at Arginine126 of the rat APOBEC1 amino acid sequence, or a corresponding position in a homologous APOBEC protein, such as Arginine320 of APOBEC3G. In some embodiments, the arginine residue at position 126 is replaced by an alanine residue (R126A) or by a glutamic acid (R126E).

[0723] In some embodiments, the cytidine deaminase comprises a mutation at arginine132 of the APOBEC1 amino acid sequence, or a corresponding position in a homologous APOBEC protein. In some embodiments, the arginine residue at position 132 is replaced by a glutamic acid residue (R132E).

[0724] In some embodiments, to narrow the width of the editing window, the cytidine deaminase may comprise one or more of the mutations: W90Y, W90F, R126E and R132E, based on amino acid sequence positions of rat APOBEC1, and mutations in a homologous APOBEC protein corresponding to the above.

[0725] In some embodiments, to reduce editing efficiency, the cytidine deaminase may comprise one or more of the mutations: W90A, R118A, R132E, based on amino acid sequence positions of rat APOBEC1, and mutations in a homologous APOBEC protein corresponding to the above. In particular embodiments, it can be of interest to use a cytidine deaminase enzyme with reduced efficacy to reduce off-target effects.

[0726] In some embodiments, the cytidine deaminase is wild-type rat APOBEC1 (rAPOBEC1, or a catalytic domain thereof. In some embodiments, the cytidine deaminase comprises one or more mutations in the rAPOBEC1 sequence, such that the editing efficiency, and/or substrate editing preference of rAPOBEC1 is changed according to specific needs.

rAPOBEC1:
(SEQ ID NO: 433)
[sequence omitted]

[0727] In some embodiments, the cytidine deaminase is wild-type human APOBEC1 (hAPOBEC) or a catalytic domain thereof. In some embodiments, the cytidine deaminase comprises one or more mutations in the hAPOBEC1 sequence, such that the editing efficiency, and/or substrate editing preference of hAPOBEC1 is changed according to specific needs.

APOBEC1:
(SEQ ID NO: 434)
MTSEKGPSTGDPTLRRRIEPWEFDVFYDPRELRKEACLLYEIKWGMSRKI
WRSSGKNTTNHVEVNFIKKFTSERDFHPSMSCSITWFLSWSPCWECSQAI
REFLSRHPGVTLVIYVARLFWHMDQQNRQGLRDLVNSGVTIQIMRASEYY
HCWRNFVNYPPGDEAHWPQYPPLWMMLYALELHCIILSLPPCLKISRRWQ
NHLTFFRLHLQNCHYQTIPPHILLATGLIHPSVAWR

[0728] In some embodiments, the cytidine deaminase is wild-type human APOBEC3G (hAPOBEC3G) or a catalytic domain thereof. In some embodiments, the cytidine deaminase comprises one or more mutations in the hAPOBEC3G sequence, such that the editing efficiency, and/or substrate editing preference of hAPOBEC3G is changed according to specific needs.

hAPOBEC3G:
(SEQ ID NO: 435)
MELKYHPEMRFFHWFSKWRKLHRDQEYEVTWYISWSPCTKCTRDMATFLA
EDPKVTLTIFVARLYYFWDPDYQEALRSLCQKRDGPRATMKIMNYDEFQH
CWSKFVYSQRELFEPWNNLPKYYILLHIMLGEILRHSMDPPTFTFNFNNE
PWVRGRHETYLCYEVERMHNDTWVLLNQRRGFLCNQAPHKHGFLEGRHAE
LCFLDVIPFWKLDLDQDYRVTCFTSWSPCFSCAQEMAKFISKNKHVSLCI
FTARIYDDQGRCQEGLRTLAEAGAKISIMTYSEFKHCWDTFVDHQGCPFQ
PWDGLDEHSQDLSGRLRAILQNQEN

[0729] In some embodiments, the cytidine deaminase is wild-type Petromyzon marinus CDA1 (pmCDA1) or a catalytic domain thereof. In some embodiments, the cytidine deaminase comprises one or more mutations in the pmCDA1 sequence, such that the editing efficiency, and/or substrate editing preference of pmCDA1 is changed according to specific needs.

pmCDA1:
(SEQ ID NO: 436)
MTDAEYVRIHEKLDIYTFKKQFFNNKKSVSHRCYVLFELKRRGERRACFW
GYAVNKPQSGTERGIHAEIFSIRKVEEYLRDNPGQFTINWYSSWSPCADC
AEKILEWYNQELRGNGHTLKIWACKLYYEKNARNQIGLWNLRDNGVGLNV
MVSEHYQCCRKIFIQSSHNQLNENRWLEKTLKRAEKRRSELSIMIQVKIL
HTTKSPAV

[0730] In some embodiments, the cytidine deaminase is wild-type human AID (hAID) or a catalytic domain thereof. In some embodiments, the cytidine deaminase comprises one or more mutations in the pmCDA1 sequence, such that the editing efficiency, and/or substrate editing preference of pmCDA1 is changed according to specific needs.

hAID:
(SEQ ID NO: 437)
MDSLLMNRRKFLYQFKNVRWAKGRRETYLCYVVKRRDSATSFSLDFGYLR
NKNGCHVELLFLRYISDWDLDPGRCYRVTWFTSWSPCYDCARHVADFLRG
NPYLSLRIFTARLYFCEDRKAEPEGLRRLHRAGVQIAIMTFKDYFYCWNT
FVENHERTFKAWEGLHENSVRLSRQLRRILLPLYEVDDLRDAFRTLGLLD

[0731] In some embodiments, the cytidine deaminase is truncated version of hAID (hAID-DC) or a catalytic domain thereof. In some embodiments, the cytidine deaminase comprises one or more mutations in the hAID-DC sequence, such that the editing efficiency, and/or substrate editing preference of hAID-DC is changed according to specific needs.

hAID-DC:
(SEQ ID NO: 438)
MDSLLMNRRKFLYQFKNVRWAKGRRETYLCYVVKRRDSATSFSLDFGYLR
NKNGCHVELLFLRYISDWDLDPGRCYRVTWFTSWSPCYDCARHVADFLRG
NPNLSLRIFTARLYFCEDRKAEPEGLRRLHRAGVQIAIMTFKDYFYCWNT
FVENHERTFKAWEGLHENSVRLSRQLRRILL

[0732] Additional embodiments of the cytidine deaminase are disclosed in WO WO2017/070632, titled “Nucleobase Editor and Uses Thereof,” which is incorporated herein by reference in its entirety.

[0733] In some embodiments, the cytidine deaminase has an efficient deamination window that encloses the nucleotides susceptible to deamination editing. Accordingly, in some embodiments, the “editing window width” refers to the number of nucleotide positions at a given target site for which editing efficiency of the cytidine deaminase exceeds the half-maximal value for that target site. In some embodiments, the cytidine deaminase has an editing window width in the range of about 1 to about 6 nucleotides. In some embodiments, the editing window width of the cytidine deaminase is 1, 2, 3, 4, 5, or 6 nucleotides.

[0734] Not intended to be bound by theory, it is contemplated that in some embodiments, the length of the linker sequence affects the editing window width. In some embodiments, the editing window width increases (e.g., from about 3 to about 6 nucleotides) as the linker length extends (e.g., from about 3 to about 21 amino acids). In a non-limiting example, a 16-residue linker offers an efficient deamination window of about 5 nucleotides. In some embodiments, the length of the guide RNA affects the editing window width. In some embodiments, shortening the guide RNA leads to a narrowed efficient deamination window of the cytidine deaminase.

[0735] In some embodiments, mutations to the cytidine deaminase affect the editing window width. In some embodiments, the cytidine deaminase component of the CD-functionalized CRISPR system comprises one or more mutations that reduce the catalytic efficiency of the cytidine deaminase, such that the deaminase is prevented from deamination of multiple cytidines per DNA binding event. In some embodiments, tryptophan at residue 90 (W90) of APOBEC1 or a corresponding tryptophan residue in a homologous sequence is mutated. In some embodiments, the catalytically inactive Cas13 is fused to or linked to an APOBEC1 mutant that comprises a W90Y or W90F mutation. In some embodiments, tryptophan at residue 285 (W285) of APOBEC3G, or a corresponding tryptophan residue in a homologous sequence is mutated. In some embodiments, the catalytically inactive Cas13 is fused to or linked to an APOBEC3G mutant that comprises a W285Y or W285F mutation.

[0736] In some embodiments, the cytidine deaminase component of CD-functionalized CRISPR system comprises one or more mutations that reduce tolerance for non-optimal presentation of a cytidine to the deaminase active site. In some embodiments, the cytidine deaminase comprises one or more mutations that alter substrate binding activity of the deaminase active site. In some embodiments, the cytidine deaminase comprises one or more mutations that alter the conformation of DNA to be recognized and bound by the deaminase active site. In some embodiments, the cytidine deaminase comprises one or more mutations that alter the substrate accessibility to the deaminase active site. In some embodiments, arginine at residue 126 (R126) of APOBEC1 or a corresponding arginine residue in a homologous sequence is mutated. In some embodiments, the catalytically inactive Cas13 is fused to or linked to an APOBEC1 that comprises a R126A or R126E mutation. In some embodiments, tryptophan at residue 320 (R320) of APOBEC3G, or a corresponding arginine residue in a homologous sequence is mutated. In some embodiments, the catalytically inactive Cas13 is fused to or linked to an APOBEC3G mutant that comprises a R320A or R320E mutation. In some embodiments, arginine at residue 132 (R132) of APOBEC1 or a corresponding arginine residue in a homologous sequence is mutated. In some embodiments, the catalytically inactive Cas13 is fused to or linked to an APOBEC mutant that comprises a R132E mutation.

[0737] In some embodiments, the APOBEC1 domain of the CD-functionalized CRISPR system comprises one, two, or three mutations selected from W90Y, W90F, R126A, R126E, and R132E. In some embodiments, the APOBEC1 domain comprises double mutations of W90Y and R126E. In some embodiments, the APOBEC1 domain comprises double mutations of W90Y and R132E. In some embodiments, the APOBEC1 domain comprises double mutations of R126E and R132E. In some embodiments, the APOBEC1 domain comprises three mutations of W90Y, R126E and R132E.

[0738] In some embodiments, one or more mutations in the cytidine deaminase as disclosed herein reduce the editing window width to about 2 nucleotides. In some embodiments, one or more mutations in the cytidine deaminase as disclosed herein reduce the editing window width to about 1 nucleotide. In some embodiments, one or more mutations in the cytidine deaminase as disclosed herein reduce the editing window width while only minimally or modestly affecting the editing efficiency of the enzyme. In some embodiments, one or more mutations in the cytidine deaminase as disclosed herein reduce the editing window width without reducing the editing efficiency of the enzyme. In some embodiments, one or more mutations in the cytidine deaminase as disclosed herein enable discrimination of neighboring cytidine nucleotides, which would be otherwise edited with similar efficiency by the cytidine deaminase.

[0739] In some embodiments, the cytidine deaminase protein further comprises or is connected to one or more double-stranded RNA (dsRNA) binding motifs (dsRBMs) or domains (dsRBDs) for recognizing and binding to double-stranded nucleic acid substrates. In some embodiments, the interaction between the cytidine deaminase and the substrate is mediated by one or more additional protein factor(s), including a CRISPR/CAS protein factor. In some embodiments, the interaction between the cytidine deaminase and the substrate is further mediated by one or more nucleic acid component(s), including a guide RNA.

[0740] According to the present invention, the substrate of the cytidine deaminase is an DNA single strand bubble of a RNA duplex comprising a Cytosine of interest, made accessible to the cytidine deaminase upon binding of the guide molecule to its DNA target which then forms the CRISPR-Cas complex with the CRISPR-Cas enzyme, whereby the cytosine deaminase is fused to or is capable of binding to one or more components of the CRISPR-Cas complex, i.e. the CRISPR-Cas enzyme and/or the guide molecule. The particular features of the guide molecule and CRISPR-Cas enzyme are detailed below.

### Base Editing Guide Molecule Design Considerations

[0741] In some embodiments, the guide sequence is an RNA sequence of between 10 to 50 nt in length, but more particularly of about 20-30 nt advantageously about 20 nt, 23-25 nt or 24 nt. In base editing embodiments, the guide sequence is selected so as to ensure that it hybridizes to the target sequence comprising the adenosine to be deaminated. This is described more in detail below. Selection can encompass further steps which increase efficacy and specificity of deamination.

[0742] In some embodiments, the guide sequence is about 20 nt to about 30 nt long and hybridizes to the target DNA strand to form an almost perfectly matched duplex, except for having a dA-C mismatch at the target adenosine site. Particularly, in some embodiments, the dA-C mismatch is located close to the center of the target sequence (and thus the center of the duplex upon hybridization of the guide sequence to the target sequence), thereby restricting the adenosine deaminase to a narrow editing window (e.g., about 4 bp wide). In some embodiments, the target sequence may comprise more than one target adenosine to be deaminated. In further embodiments the target sequence may further comprise one or more dA-C mismatch 3′ to the target adenosine site. In some embodiments, to avoid off-target editing at an unintended Adenine site in the target sequence, the guide sequence can be designed to comprise a non-pairing Guanine at a position corresponding to said unintended Adenine to introduce a dA-G mismatch, which is catalytically unfavorable for certain adenosine deaminases such as ADAR1 and ADAR2. See Wong et al., RNA 7:846-858 (2001), which is incorporated herein by reference in its entirety.

[0743] In some embodiments, a Cas12b guide sequence having a canonical length (e.g., about 20 nt for AacC2c1) is used to form a heteroduplex with the target DNA. In some embodiments, a Cas12b guide molecule longer than the canonical length (e.g., >20 nt for AacC2c1) is used to form a heteroduplex with the target DNA including outside of the Cas12b-guide RNA-target DNA complex. This can be of interest where deamination of more than one adenine within a given stretch of nucleotides is of interest. In alternative embodiments, it is of interest to maintain the limitation of the canonical guide sequence length. In some embodiments, the guide sequence is designed to introduce a dA-C mismatch outside of the canonical length of Cas12b guide, which may decrease steric hindrance by Cas12b and increase the frequency of contact between the adenosine deaminase and the dA-C mismatch.

[0744] In some base editing embodiments, the position of the mismatched nucleobase (e.g., cytidine) is calculated from where the PAM would be on a DNA target. In some embodiments, the mismatched nucleobase is positioned 12-21 nt from the PAM, or 13-21 nt from the PAM, or 14-21 nt from the PAM, or 14-20 nt from the PAM, or 15-20 nt from the PAM, or 16-20 nt from the PAM, or 14-19 nt from the PAM, or 15-19 nt from the PAM, or 16-19 nt from the PAM, or 17-19 nt from the PAM, or about 20 nt from the PAM, or about 19 nt from the PAM, or about 18 nt from the PAM, or about 17 nt from the PAM, or about 16 nt from the PAM, or about 15 nt from the PAM, or about 14 nt from the PAM. In a preferred embodiment, the mismatched nucleobase is positioned 17-19 nt or 18 nt from the PAM.

[0745] Mismatch distance is the number of bases between the 3′ end of the Cas12b spacer and the mismatched nucleobase (e.g., cytidine), wherein the mismatched base is included as part of the mismatch distance calculation. In some embodiment, the mismatch distance is 1-10 nt, or 1-9 nt, or 1-8 nt, or 2-8 nt, or 2-7 nt, or 2-6 nt, or 3-8 nt, or 3-7 nt, or 3-6 nt, or 3-5 nt, or about 2 nt, or about 3 nt, or about 4 nt, or about 5 nt, or about 6 nt, or about 7 nt, or about 8 nt. In a preferred embodiment, the mismatch distance is 3-5 nt or 4 nt.

[0746] In some embodiment, the editing window of a Cas12b-ADAR system described herein is 12-21 nt from the PAM, or 13-21 nt from the PAM, or 14-21 nt from the PAM, or 14-20 nt from the PAM, or 15-20 nt from the PAM, or 16-20 nt from the PAM, or 14-19 nt from the PAM, or 15-19 nt from the PAM, or 16-19 nt from the PAM, or 17-19 nt from the PAM, or about 20 nt from the PAM, or about 19 nt from the PAM, or about 18 nt from the PAM, or about 17 nt from the PAM, or about 16 nt from the PAM, or about 15 nt from the PAM, or about 14 nt from the PAM. In some embodiment, the editing window of the Cas12b-ADAR system described herein is 1-10 nt from the 3′ end of the Cas12b spacer, or 1-9 nt from the 3′ end of the Cas12b spacer, or 1-8 nt from the 3′ end of the Cas12b spacer, or 2-8 nt from the 3′ end of the C2c1 spacer, or 2-7 nt from the 3′ end of the Cas12b spacer, or 2-6 nt from the 3′ end of the Cas12b spacer, or 3-8 nt from the 3′ end of the Cas12b spacer, or 3-7 nt from the 3′ end of the Cas12b spacer, or 3-6 nt from the 3′ end of the Cas12b spacer, or 3-5 nt from the 3′ end of the Cas12b spacer, or about 2 nt from the 3′ end of the Cas12b spacer, or about 3 nt from the 3′ end of the Cas12b spacer, or about 4 nt from the 3′ end of the Cas12b spacer, or about 5 nt from the 3′ end of the Cas12b spacer, or about 6 nt from the 3′ end of the Cas12b spacer, or about 7 nt from the 3′ end of the Cas12b spacer, or about 8 nt from the 3′ end of the Cas12b spacer.

### Vectors

[0747] In general, and throughout this specification, the term “vector” refers to a nucleic acid molecule capable of transporting another nucleic acid to which it has been linked. It is a replicon, such as a plasmid, phage, or cosmid, into which another DNA segment may be inserted so as to bring about the replication of the inserted segment. Generally, a vector is capable of replication when associated with the proper control elements.

[0748] In some embodiments, the present disclosure provides for a vector system comprising one or more polynucleotides encoding one or more components of a CRISPR-Cas system. In some embodiments, the vector system is a Cas12b vector system, which comprises one or more vectors comprising: a first regulatory element operably linked to a nucleotide sequence encoding a Cas12b effector protein from Table 1 or 2, and i) a) a second regulatory element operably linked to a nucleotide sequence encoding the crRNA, and b) a third regulatory element operably linked to a nucleotide sequence encoding the tracr RNA, or ii) a second regulatory element operably linked to a nucleotide sequence encoding the crRNA and the tracr RNA. In some cases, the vector system comprises a single vector. Alternatively, the vector system comprises multiple vectors. The vector(s) may be viral vector(s).

[0749] Vectors include, but are not limited to, nucleic acid molecules that are single-stranded, double-stranded, or partially double-stranded; nucleic acid molecules that comprise one or more free ends, no free ends (e.g., circular); nucleic acid molecules that comprise DNA, RNA, or both; and other varieties of polynucleotides known in the art. One type of vector is a “plasmid,” which refers to a circular double stranded DNA loop into which additional DNA segments can be inserted, such as by standard molecular cloning techniques. Another type of vector is a viral vector, wherein virally-derived DNA or RNA sequences are present in the vector for packaging into a virus (e.g., retroviruses, replication defective retroviruses, adenoviruses, replication defective adenoviruses, and adeno-associated viruses). Viral vectors also include polynucleotides carried by a virus for transfection into a host cell. Certain vectors are capable of autonomous replication in a host cell into which they are introduced (e.g., bacterial vectors having a bacterial origin of replication and episomal mammalian vectors). Other vectors (e.g., non-episomal mammalian vectors) are integrated into the genome of a host cell upon introduction into the host cell, and thereby are replicated along with the host genome. Moreover, certain vectors are capable of directing the expression of genes to which they are operatively-linked. Such vectors are referred to herein as “expression vectors.” Vectors for and that result in expression in a eukaryotic cell can be referred to herein as “eukaryotic expression vectors.” Common expression vectors of utility in recombinant DNA techniques are often in the form of plasmids.

[0750] Recombinant expression vectors can comprise a nucleic acid of the invention in a form suitable for expression of the nucleic acid in a host cell, which means that the recombinant expression vectors include one or more regulatory elements, which may be selected on the basis of the host cells to be used for expression, that is operatively-linked to the nucleic acid sequence to be expressed. Within a recombinant expression vector, “operably linked” is intended to mean that the nucleotide sequence of interest is linked to the regulatory element(s) in a manner that allows for expression of the nucleotide sequence (e.g., in an in vitro transcription/translation system or in a host cell when the vector is introduced into the host cell). Advantageous vectors include lentiviruses and adeno-associated viruses, and types of such vectors can also be selected for targeting particular types of cells.

[0751] With regards to recombination and cloning methods, mention is made of U.S. patent application Ser. No. 10/815,730, published Sep. 2, 2004 as US 2004-0171156 A1, the contents of which are herein incorporated by reference in their entirety.

[0752] The term “regulatory element” is intended to include promoters, enhancers, internal ribosomal entry sites (IRES), and other expression control elements (e.g., transcription termination signals, such as polyadenylation signals and poly-U sequences). Such regulatory elements are described, for example, in Goeddel, GENE EXPRESSION TECHNOLOGY: METHODS IN ENZYMOLOGY 185, Academic Press, San Diego, Calif. (1990). Regulatory elements include those that direct constitutive expression of a nucleotide sequence in many types of host cell and those that direct expression of the nucleotide sequence only in certain host cells (e.g., tissue-specific regulatory sequences). A tissue-specific promoter may direct expression primarily in a desired tissue of interest, such as muscle, neuron, bone, skin, blood, specific organs (e.g., liver, pancreas), or particular cell types (e.g., lymphocytes). Regulatory elements may also direct expression in a temporal-dependent manner, such as in a cell-cycle dependent or developmental stage-dependent manner, which may or may not also be tissue or cell-type specific. In some embodiments, a vector comprises one or more pol III promoter (e.g., 1, 2, 3, 4, 5, or more pol III promoters), one or more pol II promoters (e.g., 1, 2, 3, 4, 5, or more pol II promoters), one or more pol I promoters (e.g., 1, 2, 3, 4, 5, or more pol I promoters), or combinations thereof. Examples of pol III promoters include, but are not limited to, U6 and H1 promoters. Examples of pol II promoters include, but are not limited to, the retroviral Rous sarcoma virus (RSV) LTR promoter (optionally with the RSV enhancer), the cytomegalovirus (CMV) promoter (optionally with the CMV enhancer) [see, e.g., Boshart et al, Cell, 41:521-530 (1985)], the SV40 promoter, the dihydrofolate reductase promoter, the β-actin promoter, the phosphoglycerol kinase (PGK) promoter, and the EF1α promoter. Also encompassed by the term “regulatory element” are enhancer elements, such as WPRE; CMV enhancers; the R-U5′ segment in LTR of HTLV-I (Mol. Cell. Biol., Vol. 8(1), p. 466-472, 1988); SV40 enhancer; and the intron sequence between exons 2 and 3 of rabbit β-globin (Proc. Natl. Acad. Sci. USA., Vol. 78(3), p. 1527-31, 1981). It will be appreciated by those skilled in the art that the design of the expression vector can depend on such factors as the choice of the host cell to be transformed, the level of expression desired, etc. A vector can be introduced into host cells to thereby produce transcripts, proteins, or peptides, including fusion proteins or peptides, encoded by nucleic acids as described herein (e.g., clustered regularly interspersed short palindromic repeats (CRISPR) transcripts, proteins, enzymes, mutant forms thereof, fusion proteins thereof, etc.). With regards to regulatory sequences, mention is made of U.S. patent application Ser. No. 10/491,026, the contents of which are incorporated by reference herein in their entirety. With regards to promoters, mention is made of PCT publication WO 2011/028929 and U.S. application Ser. No. 12/511,940, the contents of which are incorporated by reference herein in their entirety.

[0753] Advantageous vectors include lentiviruses and adeno-associated viruses, and types of such vectors can also be selected for targeting particular types of cells.

[0754] In particular embodiments, use is made of bicistronic vectors for guide RNA and (optionally modified or mutated) CRISPR enzymes (e.g. C2c1). Bicistronic expression vectors for guide RNA and (optionally modified or mutated) CRISPR enzymes are preferred. In general and particularly in this embodiment (optionally modified or mutated) CRISPR enzymes are preferably driven by the CBh promoter. The RNA may preferably be driven by a Pol III promoter, such as a U6 promoter. Ideally the two are combined.

[0755] Vectors can be designed for expression of CRISPR transcripts (e.g. nucleic acid transcripts, proteins, or enzymes) in prokaryotic or eukaryotic cells. For example, CRISPR transcripts can be expressed in bacterial cells such as Escherichia coli, insect cells (using baculovirus expression vectors), yeast cells, or mammalian cells. Suitable host cells are discussed further in Goeddel, GENE EXPRESSION TECHNOLOGY: METHODS IN ENZYMOLOGY 185, Academic Press, San Diego, Calif. (1990). Alternatively, the recombinant expression vector can be transcribed and translated in vitro, for example using T7 promoter regulatory sequences and T7 polymerase.

[0756] Vectors may be introduced and propagated in a prokaryote or prokaryotic cell. In some embodiments, a prokaryote is used to amplify copies of a vector to be introduced into a eukaryotic cell or as an intermediate vector in the production of a vector to be introduced into a eukaryotic cell (e.g. amplifying a plasmid as part of a viral vector packaging system). In some embodiments, a prokaryote is used to amplify copies of a vector and express one or more nucleic acids, such as to provide a source of one or more proteins for delivery to a host cell or host organism. Expression of proteins in prokaryotes is most often carried out in Escherichia coli with vectors containing constitutive or inducible promoters directing the expression of either fusion or non-fusion proteins. Fusion vectors add a number of amino acids to a protein encoded therein, such as to the amino terminus of the recombinant protein. Such fusion vectors may serve one or more purposes, such as: (i) to increase expression of recombinant protein; (ii) to increase the solubility of the recombinant protein; and (iii) to aid in the purification of the recombinant protein by acting as a ligand in affinity purification. Often, in fusion expression vectors, a proteolytic cleavage site is introduced at the junction of the fusion moiety and the recombinant protein to enable separation of the recombinant protein from the fusion moiety subsequent to purification of the fusion protein. Such enzymes, and their cognate recognition sequences, include Factor Xa, thrombin and enterokinase. Example fusion expression vectors include pGEX (Pharmacia Biotech Inc; Smith and Johnson, 1988. Gene 67: 31-40), pMAL (New England Biolabs, Beverly, Mass.) and pRIT5 (Pharmacia, Piscataway, N.J.) that fuse glutathione S-transferase (GST), maltose E binding protein, or protein A, respectively, to the target recombinant protein. Examples of suitable inducible non-fusion E. coli expression vectors include pTrc (Amrann et al., (1988) Gene 69:301-315) and pET lid (Studier et al., GENE EXPRESSION TECHNOLOGY: METHODS IN ENZYMOLOGY 185, Academic Press, San Diego, Calif. (1990) 60-89). In some embodiments, a vector is a yeast expression vector. Examples of vectors for expression in yeast Saccharomyces cerivisae include pYepSecl (Baldari, et al., 1987. EMBO J. 6: 229-234), pMFa (Kuijan and Herskowitz, 1982. Cell 30: 933-943), pJRY88 (Schultz et al., 1987. Gene 54: 113-123), pYES2 (Invitrogen Corporation, San Diego, Calif.), and picZ (InVitrogen Corp, San Diego, Calif.). In some embodiments, a vector drives protein expression in insect cells using baculovirus expression vectors. Baculovirus vectors available for expression of proteins in cultured insect cells (e.g., SF9 cells) include the pAc series (Smith, et al., 1983. Mol. Cell. Biol. 3: 2156-2165) and the pVL series (Lucklow and Summers, 1989. Virology 170: 31-39).

[0757] In some embodiments, a vector is capable of driving expression of one or more sequences in mammalian cells using a mammalian expression vector. Examples of mammalian expression vectors include pCDM8 (Seed, 1987. Nature 329: 840) and pMT2PC (Kaufman, et al., 1987. EMBO J. 6: 187-195). When used in mammalian cells, the expression vector's control functions are typically provided by one or more regulatory elements. For example, commonly used promoters are derived from polyoma, adenovirus 2, cytomegalovirus, simian virus 40, and others disclosed herein and known in the art. For other suitable expression systems for both prokaryotic and eukaryotic cells see, e.g., Chapters 16 and 17 of Sambrook, et al., MOLECULAR CLONING: A LABORATORY MANUAL. 2nd ed., Cold Spring Harbor Laboratory, Cold Spring Harbor Laboratory Press, Cold Spring Harbor, N.Y., 1989.

[0758] In some embodiments, the recombinant mammalian expression vector is capable of directing expression of the nucleic acid preferentially in a particular cell type (e.g., tissue-specific regulatory elements are used to express the nucleic acid). Tissue-specific regulatory elements are known in the art. Non-limiting examples of suitable tissue-specific promoters include the albumin promoter (liver-specific; Pinkert, et al., 1987. Genes Dev. 1: 268-277), lymphoid-specific promoters (Calame and Eaton, 1988. Adv. Immunol. 43: 235-275), in particular promoters of T cell receptors (Winoto and Baltimore, 1989. EMBO J. 8: 729-733) and immunoglobulins (Baneiji, et al., 1983. Cell 33: 729-740; Queen and Baltimore, 1983. Cell 33: 741-748), neuron-specific promoters (e.g., the neurofilament promoter; Byrne and Ruddle, 1989. Proc. Natl. Acad. Sci. USA 86: 5473-5477), pancreas-specific promoters (Edlund, et al., 1985. Science 230: 912-916), and mammary gland-specific promoters (e.g., milk whey promoter; U.S. Pat. No. 4,873,316 and European Application Publication No. 264,166). Developmentally-regulated promoters are also encompassed, e.g., the murine hox promoters (Kessel and Gruss, 1990. Science 249: 374-379) and the α-fetoprotein promoter (Campes and Tilghman, 1989. Genes Dev. 3: 537-546). With regards to these prokaryotic and eukaryotic vectors, mention is made of U.S. Pat. No. 6,750,059, the contents of which are incorporated by reference herein in their entirety. Other embodiments of the invention may relate to the use of viral vectors, with regards to which mention is made of U.S. patent application Ser. No. 13/092,085, the contents of which are incorporated by reference herein in their entirety. Tissue-specific regulatory elements are known in the art and in this regard, mention is made of U.S. Pat. No. 7,776,321, the contents of which are incorporated by reference herein in their entirety. In some embodiments, a regulatory element is operably linked to one or more elements of a CRISPR system so as to drive expression of the one or more elements of the CRISPR system.

[0759] In some embodiments, one or more vectors driving expression of one or more elements of a nucleic acid-targeting system are introduced into a host cell such that expression of the elements of the nucleic acid-targeting system direct formation of a nucleic acid-targeting complex at one or more target sites. For example, a nucleic acid-targeting effector enzyme and a nucleic acid-targeting guide RNA and/or tracr could each be operably linked to separate regulatory elements on separate vectors. RNA(s) of the nucleic acid-targeting system can be delivered to a transgenic nucleic acid-targeting effector protein animal or mammal, e.g., an animal or mammal that constitutively or inducibly or conditionally expresses nucleic acid-targeting effector protein; or an animal or mammal that is otherwise expressing nucleic acid-targeting effector proteins or has cells containing nucleic acid-targeting effector proteins, such as by way of prior administration thereto of a vector or vectors that code for and express in vivo nucleic acid-targeting effector proteins. Alternatively, two or more of the elements expressed from the same or different regulatory elements, may be combined in a single vector, with one or more additional vectors providing any components of the nucleic acid-targeting system not included in the first vector. nucleic acid-targeting system elements that are combined in a single vector may be arranged in any suitable orientation, such as one element located 5′ with respect to (“upstream” of) or 3′ with respect to (“downstream” of) a second element. The coding sequence of one element may be located on the same or opposite strand of the coding sequence of a second element, and oriented in the same or opposite direction. In some embodiments, a single promoter drives expression of a transcript encoding a nucleic acid-targeting effector protein and the nucleic acid-targeting guide RNA, embedded within one or more intron sequences (e.g., each in a different intron, two or more in at least one intron, or all in a single intron). In some embodiments, the nucleic acid-targeting effector protein and the nucleic acid-targeting guide RNA may be operably linked to and expressed from the same promoter. Delivery vehicles, vectors, particles, nanoparticles, formulations and components thereof for expression of one or more elements of a nucleic acid-targeting system are as used in the foregoing documents, such as WO 2014/093622 (PCT/US2013/074667). In some embodiments, a vector comprises one or more insertion sites, such as a restriction endonuclease recognition sequence (also referred to as a “cloning site”). In some embodiments, one or more insertion sites (e.g., about or more than about 1, 2, 3, 4, 5, 6, 7, 8, 9, 10, or more insertion sites) are located upstream and/or downstream of one or more sequence elements of one or more vectors. When multiple different guide sequences are used, a single expression construct may be used to target nucleic acid-targeting activity to multiple different, corresponding target sequences within a cell. For example, a single vector may comprise about or more than about 1, 2, 3, 4, 5, 6, 7, 8, 9, 10, 15, 20, or more guide sequences. In some embodiments, about or more than about 1, 2, 3, 4, 5, 6, 7, 8, 9, 10, or more such guide-sequence-containing vectors may be provided, and optionally delivered to a cell. In some embodiments, a vector comprises a regulatory element operably linked to an enzyme-coding sequence encoding a nucleic acid-targeting effector protein. Nucleic acid-targeting effector protein or nucleic acid-targeting guide RNA or RNA(s) can be delivered separately; and advantageously at least one of these is delivered via a particle complex. nucleic acid-targeting effector protein mRNA can be delivered prior to the nucleic acid-targeting guide RNA to give time for nucleic acid-targeting effector protein to be expressed. Nucleic acid-targeting effector protein mRNA might be administered 1-12 hours (preferably around 2-6 hours) prior to the administration of nucleic acid-targeting guide RNA. Alternatively, nucleic acid-targeting effector protein mRNA and nucleic acid-targeting guide RNA can be administered together. Advantageously, a second booster dose of guide RNA can be administered 1-12 hours (preferably around 2-6 hours) after the initial administration of nucleic acid-targeting effector protein mRNA+guide RNA. Additional administrations of nucleic acid-targeting effector protein mRNA and/or guide RNA might be useful to achieve the most efficient levels of genome modification.

[0760] In some embodiments, a vector encodes a C2c1 effector protein comprising one or more nuclear localization sequences (NLSs), such as about or more than about 1, 2, 3, 4, 5, 6, 7, 8, 9, 10, or more NLSs. More particularly, vector comprises one or more NLSs not naturally present in the C2c1 effector protein. Most particularly, the NLS is present in the vector 5′ and/or 3′ of the C2c1 effector protein sequence. In some embodiments, the RNA-targeting effector protein comprises about or more than about 1, 2, 3, 4, 5, 6, 7, 8, 9, 10, or more NLSs at or near the amino-terminus, about or more than about 1, 2, 3, 4, 5, 6, 7, 8, 9, 10, or more NLSs at or near the carboxy-terminus, or a combination of these (e.g., zero or at least one or more NLS at the amino-terminus and zero or at one or more NLS at the carboxy terminus). When more than one NLS is present, each may be selected independently of the others, such that a single NLS may be present in more than one copy and/or in combination with one or more other NLSs present in one or more copies. In some embodiments, an NLS is considered near the N- or C-terminus when the nearest amino acid of the NLS is within about 1, 2, 3, 4, 5, 10, 15, 20, 25, 30, 40, 50, or more amino acids along the polypeptide chain from the N- or C-terminus. Non-limiting examples of NLSs include an NLS sequence derived from: the NLS of the SV40 virus large T-antigen, having the amino acid sequence PKKKRKV (SEQ ID NO:462); the NLS from nucleoplasmin (e.g., the nucleoplasmin bipartite NLS with the sequence KRPAATKKAGQAKKKK (SEQ ID NO:463)); the c-myc NLS having the amino acid sequence PAAKRVKLD (SEQ ID NO:464) or RQRRNELKRSP (SEQ ID NO:465); the hRNPA1 M9 NLS having the sequence NQSSNFGPMKGGNFGGRSSGPYGGGGQYFAKPRNQGGY (SEQ ID NO:466); the sequence RMRIZFKNKGKDTAELRRRRVEVSVELRKAKKDEQILKRRNV (SEQ ID NO:467) of the IBB domain from importin-alpha; the sequences VSRKRPRP (SEQ ID NO:468) and PPKKARED (SEQ ID NO:469) of the myoma T protein; the sequence PQPKKKPL (SEQ ID NO:470) of human p53; the sequence SALIKKKKKMAP (SEQ ID NO:471) of mouse c-abl IV; the sequences DRLRR (SEQ ID NO:472) and PKQKKRK (SEQ ID NO:473) of the influenza virus NS1; the sequence RKLKKKIKKL (SEQ ID NO:474) of the Hepatitis virus delta antigen; the sequence REKKKFLKRR (SEQ ID NO:475) of the mouse Mxl protein; the sequence KRKGDEVDGVDEVAKKKSKK (SEQ ID NO:476) of the human poly(ADP-ribose) polymerase; and the sequence RKCLQAGMNLEARKTKK (SEQ ID NO:477) of the steroid hormone receptors (human) glucocorticoid. In general, the one or more NLSs are of sufficient strength to drive accumulation of the DNA/RNA-targeting Cas protein in a detectable amount in the nucleus of a eukaryotic cell. In general, strength of nuclear localization activity may derive from the number of NLSs in the nucleic acid-targeting effector protein, the particular NLS(s) used, or a combination of these factors. Detection of accumulation in the nucleus may be performed by any suitable technique. For example, a detectable marker may be fused to the nucleic acid-targeting protein, such that location within a cell may be visualized, such as in combination with a means for detecting the location of the nucleus (e.g., a stain specific for the nucleus such as DAPI). Cell nuclei may also be isolated from cells, the contents of which may then be analyzed by any suitable process for detecting protein, such as immunohistochemistry, Western blot, or enzyme activity assay. Accumulation in the nucleus may also be determined indirectly, such as by an assay for the effect of nucleic acid-targeting complex formation (e.g., assay for DNA or RNA cleavage or mutation at the target sequence, or assay for altered gene expression activity affected by DNA or RNA-targeting complex formation and/or DNA or RNA-targeting Cas protein activity), as compared to a control not exposed to the nucleic acid-targeting Cas protein or nucleic acid-targeting complex, or exposed to a nucleic acid-targeting Cas protein lacking the one or more NLSs. In preferred embodiments of the herein described C2c1 effector protein complexes and systems the codon optimized C2c1 effector proteins comprise an NLS attached to the C-terminal of the protein. In certain embodiments, other localization tags may be fused to the Cas protein, such as without limitation for localizing the Cas to particular sites in a cell, such as organelles, such mitochondria, plastids, chloroplast, vesicles, golgi, (nuclear or cellular) membranes, ribosomes, nucleoluse, ER, cytoskeleton, vacuoles, centrosome, nucleosome, granules, centrioles, etc.

[0761] The invention also provides a non-naturally occurring or engineered composition, or one or more polynucleotides encoding components of said composition, or vector systems comprising one or more polynucleotides encoding components of said composition for use in a therapeutic method of treatment. The therapeutic method of treatment may comprise gene or genome editing, or gene therapy.

[0762] In some embodiments, the therapeutic method of treatment comprises CRISPR-Cas system comprising guide sequences designed based on therapy or therapeutic in a population of a target organism. In some embodiments, the target organism population comprises at least 1000 individuals, such as at least 5000 individuals, such as at least 10000 individuals, such as at least 50000 individuals. In some embodiments, the target sites having minimal sequence variation across a population are characterized by absence of sequence variation in at least 99%, preferably at least 99.9%, more preferably at least 99.99% of the population.

[0763] As used herein, the term haplotype (haploid genotype) is a group of genes in an organism that are inherited together from a single parent. As used herein, haplotype frequency estimation (also known as “phasing”) refers to the process of statistical estimation of haplotypes from genotype data. Toshikazu et al. (Am J Hum Genet. 2003 February; 72(2): 384-398) describes methods for estimation of haplotype frequencies, which may be used in the invention herein disclosed.

[0764] The nucleic acids-targeting systems, the vector systems, the vectors and the compositions described herein may be used in various nucleic acids-targeting applications, altering or modifying synthesis of a gene product, such as a protein, nucleic acids cleavage, nucleic acids editing, nucleic acids splicing; trafficking of target nucleic acids, tracing of target nucleic acids, isolation of target nucleic acids, visualization of target nucleic acids, etc.

[0765] In general, and throughout this specification, the term “vector” refers to a nucleic acid molecule capable of transporting another nucleic acid to which it has been linked. Vectors include, but are not limited to, nucleic acid molecules that are single-stranded, double-stranded, or partially double-stranded; nucleic acid molecules that comprise one or more free ends, no free ends (e.g., circular); nucleic acid molecules that comprise DNA, RNA, or both; and other varieties of polynucleotides known in the art. One type of vector is a “plasmid,” which refers to a circular double stranded DNA loop into which additional DNA segments can be inserted, such as by standard molecular cloning techniques. Another type of vector is a viral vector, wherein virally-derived DNA or RNA sequences are present in the vector for packaging into a virus (e.g., retroviruses, replication defective retroviruses, adenoviruses, replication defective adenoviruses, and adeno-associated viruses). Viral vectors also include polynucleotides carried by a virus for transfection into a host cell. Certain vectors are capable of autonomous replication in a host cell into which they are introduced (e.g., bacterial vectors having a bacterial origin of replication and episomal mammalian vectors). Other vectors (e.g., non-episomal mammalian vectors) are integrated into the genome of a host cell upon introduction into the host cell, and thereby are replicated along with the host genome. Moreover, certain vectors are capable of directing the expression of genes to which they are operatively-linked. Such vectors are referred to herein as “expression vectors.” Vectors for and that result in expression in a eukaryotic cell can be referred to herein as “eukaryotic expression vectors.” Common expression vectors of utility in recombinant DNA techniques are often in the form of plasmids.

[0766] In certain embodiments, a vector system includes promoter-guide expression cassette in reverse order.

[0767] Recombinant expression vectors can comprise a nucleic acid of the invention in a form suitable for expression of the nucleic acid in a host cell, which means that the recombinant expression vectors include one or more regulatory elements, which may be selected on the basis of the host cells to be used for expression, that is operatively-linked to the nucleic acid sequence to be expressed.

[0768] Advantageous vectors include lentiviruses and adeno-associated viruses, and types of such vectors can also be selected for targeting particular types of cells.

[0769] In some embodiments, one or more vectors driving expression of one or more elements of a nucleic acid-targeting system are introduced into a host cell such that expression of the elements of the nucleic acid-targeting system direct formation of a nucleic acid-targeting complex at one or more target sites. For example, a nucleic acid-targeting effector module and a nucleic acid-targeting guide RNA could each be operably linked to separate regulatory elements on separate vectors. RNA(s) of the nucleic acid-targeting system can be delivered to a transgenic nucleic acid-targeting effector module animal or mammal, e.g., an animal or mammal that constitutively or inducibly or conditionally expresses nucleic acid-targeting effector module; or an animal or mammal that is otherwise expressing nucleic acid-targeting effector modules or has cells containing nucleic acid-targeting effector modules, such as by way of prior administration thereto of a vector or vectors that code for and express in vivo nucleic acid-targeting effector modules. Alternatively, two or more of the elements expressed from the same or different regulatory elements, may be combined in a single vector, with one or more additional vectors providing any components of the nucleic acid-targeting system not included in the first vector. nucleic acid-targeting system elements that are combined in a single vector may be arranged in any suitable orientation, such as one element located 5′ with respect to (“upstream” of) or 3′ with respect to (“downstream” of) a second element. The coding sequence of one element may be located on the same or opposite strand of the coding sequence of a second element, and oriented in the same or opposite direction. In some embodiments, a single promoter drives expression of a transcript encoding a nucleic acid-targeting effector module and the nucleic acid-targeting guide RNA, embedded within one or more intron sequences (e.g., each in a different intron, two or more in at least one intron, or all in a single intron). In some embodiments, the nucleic acid-targeting effector module and the nucleic acid-targeting guide RNA may be operably linked to and expressed from the same promoter.

[0770] The invention also encompasses methods for delivering multiple nucleic acid components, wherein each nucleic acid component is specific for a different target locus of interest thereby modifying multiple target loci of interest. The nucleic acid component of the complex may comprise one or more protein-binding RNA aptamers. The one or more aptamers may be capable of binding a bacteriophage coat protein. The bacteriophage coat protein may be selected from the group comprising Qβ, F2, GA, fr, JP501, MS2, M12, R17, BZ13, JP34, JP500, KU1, M11, MX1, TW18, VK, SP, FI, ID2, NL95, TW19, AP205, Cb5, ϕCb8r, ϕCb2r, ϕCb23r, 7s and PRR1. In a preferred embodiment the bacteriophage coat protein is MS2. The invention also provides for the nucleic acid component of the complex being 30 or more, 40 or more or 50 or more nucleotides in length.

[0771] In an aspect, the invention provides in a vector system comprising one or more vectors, wherein the one or more vectors comprises: a) a first regulatory element operably linked to a nucleotide sequence encoding the engineered CRISPR protein as defined herein; and optionally b) a second regulatory element operably linked to one or more nucleotide sequences encoding one or more nucleic acid molecules comprising a guide RNA comprising a guide sequence, a direct repeat sequence, optionally wherein components (a) and (b) are located on same or different vectors.

[0772] The invention also provides an engineered, non-naturally occurring Clustered Regularly Interspersed Short Palindromic Repeats (CRISPR)-CRISPR associated (Cas effector module) (CRISPR-Cas effector module) vector system comprising one or more vectors comprising: a) a first regulatory element operably linked to a nucleotide sequence encoding a non naturally-occurring CRISPR enzyme of any one of the inventive constructs herein; and b) a second regulatory element operably linked to one or more nucleotide sequences encoding one or more of the guide RNAs, the guide RNA comprising a guide sequence, a direct repeat sequence, wherein: components (a) and (b) are located on same or different vectors, the CRISPR complex is formed; the guide RNA targets the target polynucleotide loci and the enzyme alters the polynucleotide loci, and the enzyme in the CRISPR complex has reduced capability of modifying one or more off-target loci as compared to an unmodified enzyme and/or whereby the enzyme in the CRISPR complex has increased capability of modifying the one or more target loci as compared to an unmodified enzyme.

[0773] As used herein, a CRISPR Cas effector module or CRISRP effector module includes, but is not limited to C2c1. In some embodiments, the CRISPR-Cas effector module may be engineered.

[0774] In such a system, component (II) may comprise a first regulatory element operably linked to a polynucleotide sequence which comprises the guide sequence, the direct repeat sequence, and wherein component (II) may comprise a second regulatory element operably linked to a polynucleotide sequence encoding the CRISPR enzyme. In such a system, where applicable the guide RNA may comprise a chimeric RNA.

[0775] In such a system, component (I) may comprise a first regulatory element operably linked to the guide sequence and the direct repeat sequence, and wherein component (II) may comprise a second regulatory element operably linked to a polynucleotide sequence encoding the CRISPR enzyme. Such a system may comprise more than one guide RNA, and each guide RNA has a different target whereby there is multiplexing. Components (a) and (b) may be on the same vector.

[0776] In any such systems comprising vectors, the one or more vectors may comprise one or more viral vectors, such as one or more retrovirus, lentivirus, adenovirus, adeno-associated virus or herpes simplex virus.

[0777] In any such systems comprising regulatory elements, at least one of said regulatory elements may comprise a tissue-specific promoter. The tissue-specific promoter may direct expression in a mammalian blood cell, in a mammalian liver cell or in a mammalian eye.

[0778] In any of the above-described compositions or systems the direct repeat sequence, may comprise one or more protein-interacting RNA aptamers. The one or more aptamers may be located in the tetraloop. The one or more aptamers may be capable of binding MS2 bacteriophage coat protein.

[0779] In any of the above-described compositions or systems the cell may be a eukaryotic cell or a prokaryotic cell; wherein the CRISPR complex is operable in the cell, and whereby the enzyme of the CRISPR complex has reduced capability of modifying one or more off-target loci of the cell as compared to an unmodified enzyme and/or whereby the enzyme in the CRISPR complex has increased capability of modifying the one or more target loci as compared to an unmodified enzyme.

[0780] The invention also provides a CRISPR complex of any of the above-described compositions or from any of the above-described systems.

[0781] The invention also provides a method of modifying a locus of interest in a cell comprising contacting the cell with any of the herein-described engineered CRISPR enzymes (e.g. engineered Cas effector module), compositions or any of the herein-described systems or vector systems, or wherein the cell comprises any of the herein-described CRISPR complexes present within the cell. In such methods the cell may be a prokaryotic or eukaryotic cell, preferably a eukaryotic cell. In such methods, an organism may comprise the cell. In such methods the organism may not be a human or other animal.

[0782] In certain embodiment, the invention also provides a non-naturally-occurring, engineered composition (e.g., C2c1 or any Cas protein which can fit into an AAV vector). Reference is made to FIGS. 19A, 19B, 19C, 19D, and 20A-F in U.S. Pat. No. 8,697,359 herein incorporated by reference to provide a list and guidance for other proteins which may also be used.

[0783] Any such method may be ex vivo or in vitro.

[0784] In certain embodiments, a nucleotide sequence encoding at least one of said guide RNA or C2c1 effector module is operably connected in the cell with a regulatory element comprising a promoter of a gene of interest, whereby expression of at least one CRISPR-Cas effector module system component is driven by the promoter of the gene of interest. “operably connected” is intended to mean that the nucleotide sequence encoding the guide RNA and/or the Cas effector module is linked to the regulatory element(s) in a manner that allows for expression of the nucleotide sequence, as also referred to herein elsewhere. The term “regulatory element” is also described herein elsewhere. According to the invention, the regulatory element comprises a promoter of a gene of interest, such as preferably a promoter of an endogenous gene of interest. In certain embodiments, the promoter is at its endogenous genomic location. In such embodiments, the nucleic acid encoding the CRISPR and/or Cas effector module is under transcriptional control of the promoter of the gene of interest at its native genomic location. In certain other embodiments, the promoter is provided on a (separate) nucleic acid molecule, such as a vector or plasmid, or other extrachromosomal nucleic acid, i.e. the promoter is not provided at its native genomic location. In certain embodiments, the promoter is genomically integrated at a non-native genomic location.

[0785] The invention also provides a method of altering the expression of a genomic locus of interest in a mammalian cell comprising contacting the cell with the engineered CRISPR enzymes (e.g. engineered Cas effector module), compositions, systems or CRISPR complexes described herein and thereby delivering the CRISPR-Cas effector module (vector) and allowing the CRISPR-Cas effector module complex to form and bind to target, and determining if the expression of the genomic locus has been altered, such as increased or decreased expression, or modification of a gene product.

[0786] The invention further provides for a method of making mutations to a Cas effector module or a mutated or modified Cas effector module that is an ortholog of the CRISPR enzymes according to the invention as described herein, comprising ascertaining amino acid(s) in that ortholog may be in close proximity or may touch a nucleic acid molecule, e.g., DNA, RNA, gRNA, etc., and/or amino acid(s) analogous or corresponding to herein-identified amino acid(s) in CRISPR enzymes according to the invention as described herein for modification and/or mutation, and synthesizing or preparing or expressing the orthologue comprising, consisting of or consisting essentially of modification(s) and/or mutation(s) or mutating as herein-discussed, e.g., modifying, e.g., changing or mutating, a neutral amino acid to a charged, e.g., positively charged, amino acid, e.g., Alanine. The so modified ortholog can be used in CRISPR-Cas effector module systems; and nucleic acid molecule(s) expressing it may be used in vector systems that deliver molecules or encoding CRISPR-Cas effector module system components as herein-discussed.

[0787] In one aspect, the invention provides a kit comprising one or more of the components described herein. In some embodiments, the kit comprises a vector system and instructions for using the kit. In some embodiments, the vector system comprises (a) a first regulatory element operably linked to a direct repeat sequence and one or more insertion sites for inserting one or more guide sequences downstream of the DR sequence, wherein when expressed, the guide sequence directs sequence-specific binding of a CRISPR-Cas effector module complex to a target sequence in a eukaryotic cell, wherein the CRISPR-Cas effector module complex comprises a Cas effector module complexed with (1) the guide sequence that is hybridized to the target sequence, (2) the DR sequence, and (3) the tracr sequence; and/or (b) a second regulatory element operably linked to an enzyme-coding sequence encoding said Cas effector module comprising a nuclear localization sequence and advantageously this includes a split Cas effector module. In some embodiments, the kit comprises components (a) and (b) located on the same or different vectors of the system. In some embodiments, component (a) further comprises two or more guide sequences operably linked to the first regulatory element, wherein when expressed, each of the two or more guide sequences direct sequence specific binding of a CRISPR-Cas effector module complex to a different target sequence in a eukaryotic cell. The tracr may or may not be fused to or (encoded) on the same polynucleotide as the guide (spacer) and direct repeat sequences.

[0788] In one aspect, the invention provides a method of modifying a target polynucleotide in a eukaryotic cell. In some embodiments, the method comprises allowing a CRISPR-Cas effector module complex to bind to the target polynucleotide to effect cleavage of said target polynucleotide thereby modifying the target polynucleotide, wherein the CRISPR-Cas effector module complex comprises a Cas effector module complexed with a guide sequence hybridized to a target sequence within said target polynucleotide, wherein said guide sequence is linked to a direct repeat sequence. In some embodiments, said cleavage comprises cleaving one or two strands at the location of the target sequence by said Cas effector module; this includes a split Cas effector module. In some embodiments, said cleavage results in decreased transcription of a target gene. In some embodiments, the method further comprises repairing said cleaved target polynucleotide by homologous recombination with an exogenous template polynucleotide, wherein said repair results in a mutation comprising an insertion, deletion, or substitution of one or more nucleotides of said target polynucleotide. In some embodiments, said mutation results in one or more amino acid changes in a protein expressed from a gene comprising the target sequence. In some embodiments, the method further comprises delivering one or more vectors to said eukaryotic cell, wherein the one or more vectors drive expression of one or more of: the Cas effector module, and the guide sequence linked to the DR sequence. In some embodiments, said vectors are delivered to the eukaryotic cell in a subject. In some embodiments, said modifying takes place in said eukaryotic cell in a cell culture. In some embodiments, the method further comprises isolating said eukaryotic cell from a subject prior to said modifying. In some embodiments, the method further comprises returning said eukaryotic cell and/or cells derived therefrom to said subject. In one aspect, the invention provides a method of modifying or editing a target polynucleotide in a eukaryotic cell. In some embodiments, the method comprises allowing a CRISPR-Cas effector module complex to bind to the target polynucleotide to effect DNA base editing, wherein the CRISPR-Cas effector module complex comprises a Cas effector module complexed with a guide sequence hybridized to a target sequence within said target polynucleotide, wherein said guide sequence is linked to a direct repeat sequence. In some embodiments, the Cas effector module comprises a catalytically inactive CRISPR-Cas protein. In some embodiments, the guide sequence is designed to introduces one or more mismatches to the DNA/RNA heteroduplex formed between the target sequence and the guide sequence. In particular embodiments, the mismatch is an A-C mismatch. In some embodiments, the Cas effector may associate with one or more functional domains (e.g. via fusion protein or suitable linkers). In some embodiments, the effector domain comprises one or more cytidine or adenosine deaminases that mediate endogenous editing of via hydrolytic deamination.

[0789] In one aspect, the invention provides a method of modifying expression of a polynucleotide in a eukaryotic cell. In some embodiments, the method comprises allowing a CRISPR-Cas effector module complex to bind to the polynucleotide such that said binding results in increased or decreased expression of said polynucleotide; wherein the CRISPR-Cas effector module complex comprises a Cas effector module complexed with a guide sequence hybridized to a target sequence within said polynucleotide, wherein said guide sequence is linked to a direct repeat sequence; which may include a split Cas effector module. In some embodiments, the method further comprises delivering one or more vectors to said eukaryotic cells, wherein the one or more vectors drive expression of one or more of: the Cas effector module, and the guide sequence linked to the DR sequence.

[0790] In one aspect, the invention provides a method of modifying or editing a target transcript in a eukaryotic cell. In some embodiments, the method comprises allowing a CRISPR-Cas effector module complex to bind to the target polynucleotide to effect RNA base editing, wherein the CRISPR-Cas effector module complex comprises a Cas effector module complexed with a guide sequence hybridized to a target sequence within said target polynucleotide, wherein said guide sequence is linked to a direct repeat sequence. In some embodiments, the Cas effector module comprises a catalytically inactive CRISPR-Cas protein. In some embodiments, the guide sequence is designed to introduces one or more mismatches to the RNA/RNA duplex formed between the target sequence and the guide sequence. In particular embodiments, the mismatch is an A-C mismatch. In some embodiments, the Cas effector may associate with one or more functional domains (e.g. via fusion protein or suitable linkers). In some embodiments, the effector domain comprises one or more cytidine or adenosine deaminases that mediate endogenous editing of via hydrolytic deamination. In particular embodiments, the effector domain comprises the adenosine deaminase acting on RNA (ADAR) family of enzymes. In particular embodiments, the adenosine deaminase protein or catalytic domain thereof capable of deaminating adenosine or cytidine in RNA or is an RNA specific adenosine deaminase and/or is a bacterial, human, cephalopod, or Drosophila adenosine deaminase protein or catalytic domain thereof, preferably TadA, more preferably ADAR, optionally huADAR, optionally (hu)ADAR1 or (hu)ADAR2, preferably huADAR2 or catalytic domain thereof. In some embodiments, the cytidine deaminase is a human, rat or lamprey cytidine deaminase. In some embodiments, the cytidine deaminase is an apolipoprotein B mRNA-editing complex (APOBEC) family deaminase, an activation-induced deaminase (AID), or a cytidine deaminase 1 (CDA1).

[0791] The present application relates to modifying a target DNA sequence of interest.

[0792] A further aspect of the invention relates to the method and composition as envisaged herein for use in prophylactic or therapeutic treatment, preferably wherein said target locus of interest is within a human or animal and to methods of modifying an Adenine or Cytidine in a target DNA sequence of interest, comprising delivering to said target DNA, the composition as described hereinabove. In particular embodiments, the CRISPR system and the adenosine deaminase, or catalytic domain thereof, are delivered as one or more polynucleotide molecules, as a ribonucleoprotein complex, optionally via particles, vesicles, or one or more viral vectors. In particular embodiments, the composition is for use in the treatment or prevention of a disease caused by transcripts containing a pathogenic G-A or C-T point mutation. In particular embodiments, the invention thus comprises compositions for use in therapy. This implies that the methods can be performed in vivo, ex vivo or in vitro. In particular embodiments, the methods are not methods of treatment of the animal or human body or a method for modifying the germ line genetic identity of a human cell. In particular embodiments; when carrying out the method, the target DNA is not comprised within a human or animal cell. In particular embodiments, when the target is a human or animal target, the method is carried out ex vivo or in vitro.

[0793] A further aspect of the invention relates to the method as envisaged herein for use in prophylactic or therapeutic treatment, preferably wherein said target of interest is within a human or animal and to methods of modifying an Adenine or Cytidine in a target DNA sequence of interest, comprising delivering to said target RNA, the composition as described hereinabove. In particular embodiments, the CRISPR system and the adenosine deaminase, or catalytic domain thereof, are delivered as one or more polynucleotide molecules, as a ribonucleoprotein complex, optionally via particles, vesicles, or one or more viral vectors. In particular embodiments, the composition is for use in the treatment or prevention of a disease caused by transcripts containing a pathogenic G-A or C-T point mutation. In particular embodiments, the invention thus comprises compositions for use in therapy. This implies that the methods can be performed in vivo, ex vivo or in vitro. In particular embodiments, the methods are not methods of treatment of the animal or human body or a method for modifying the germ line genetic identity of a human cell. In particular embodiments; when carrying out the method, the target DNA is not comprised within a human or animal cell. In particular embodiments, when the target is a human or animal target, the method is carried out ex vivo or in vitro.

[0794] The invention also relates to a method for treating or preventing a disease by the targeted deamination or a disease causing variant. For example, the deamination of an A, may remedy a disease caused by transcripts containing a pathogenic G-A or C-T point mutation. Examples of disease that can be treated or prevented with the present invention include cancer, Meier-Gorlin syndrome, Seckel syndrome 4, Joubert syndrome 5, Leber congenital amaurosis 10; Charcot-Marie-Tooth disease, type 2; Charcot-Marie-Tooth disease, type 2; Usher syndrome, type 2C; Spinocerebellar ataxia 28; Spinocerebellar ataxia 28; Spinocerebellar ataxia 28; Long QT syndrome 2; Sjögren-Larsson syndrome; Hereditary fructosuria; Hereditary fructosuria; Neuroblastoma; Neuroblastoma; Kallmann syndrome 1; Kallmann syndrome 1; Kallmann syndrome 1; Metachromatic leukodystrophy.

[0795] In one aspect, the invention provides a method of generating a model eukaryotic cell comprising a mutated disease gene. In some embodiments, a disease gene is any gene associated an increase in the risk of having or developing a disease. In some embodiments, the method comprises (a) introducing one or more vectors into a eukaryotic cell, wherein the one or more vectors drive expression of one or more of: Cas effector module, and a guide sequence linked to a direct repeat sequence; and (b) allowing a CRISPR-Cas effector module complex to bind to a target polynucleotide to effect cleavage of the target polynucleotide within said disease gene, wherein the CRISPR-Cas effector module complex comprises a Cas effector module complexed with (1) the guide sequence that is hybridized to the target sequence within the target polynucleotide, (2) the DR sequence, and (3) the tracr sequence, thereby generating a model eukaryotic cell comprising a mutated disease gene; this includes a split Cas effector module. In some embodiments, said cleavage comprises cleaving one or two strands at the location of the target sequence by said Cas effector module. In a preferred embodiment, the strand break is a staggered cut with a 5′ overhang. In some embodiments, said cleavage results in decreased transcription of a target gene. In some embodiments, the method further comprises repairing said cleaved target polynucleotide by homologous recombination with an exogenous template polynucleotide, wherein said repair results in a mutation comprising an insertion, deletion, or substitution of one or more nucleotides of said target polynucleotide. In some embodiments, said mutation results in one or more amino acid changes in a protein expression from a gene comprising the target sequence. In some embodiments, the model eukaryotic cell comprises a mutated disease gene, wherein the mutation is introduced by staggered double strand breaks with a 5′ overhang. In particular embodiments, the 5′ overhang is 7 nt. In some embodiments, the model eukaryotic cell comprises a mutated disease gene, wherein the mutation is introduced by a DNA insert at the staggered 5′ overhang through HDR. In some embodiments, the model eukaryotic cell comprises a mutated disease gene, wherein the mutation is introduced by a DNA insert at the staggered 5′ overhang through NHEJ. In some embodiments, the model eukaryotic cell comprises an exogenous DNA sequence insertion introduced by the CRISPR-C2c1 system. In particular embodiments, the CRISPR-C2c1 system comprises the exogenous DNA flanked by guide sequences on both 5′ and 3′ ends. In some embodiments, the model eukaryotic cell comprises a mutated disease gene, wherein the mutation c is introduced by a DNA insert at the staggered 5′ overhang in a particular embodiment, the Cas effector module comprises a C2c1 protein, or catalytic domain thereof, and the PAM sequence a T-rich sequence. In particular embodiments, the PAM is 5′-TTN or 5′-ATTN, wherein N is any nucleotide. In a particular embodiment, the PAM is 5′-TTG. In particular embodiments, the model eukaryotic cell comprises a mutated gene associated with cancer. In a particular embodiment, the model eukaryotic cell comprises a mutated disease gene associated with human papillomavirus (HPV) driven carcinogenesis in cervical intraepithelial neoplasia (CIN). In other particular embodiments, the model eukaryotic cell comprises a mutated disease gene associated with Parkinson's disease, cystic fibrosis, cardiomyopathy and ischemic heart disease.

[0796] In one aspect the invention provides for a method of selecting one or more cell(s) by introducing one or more mutations in a gene in the one or more cell (s), the method comprising: introducing one or more vectors into the cell (s), wherein the one or more vectors drive expression of one or more of: a Cas effector module, a guide sequence linked to a direct repeat sequence, and an editing template; wherein the editing template comprises the one or more mutations that abolish Cas effector module cleavage; allowing homologous recombination of the editing template with the target polynucleotide in the cell(s) to be selected; allowing a CRISPR-Cas effector module complex to bind to a target polynucleotide to effect cleavage of the target polynucleotide within said gene, wherein the CRISPR-Cas effector module complex comprises the Cas effector module complexed with (1) the guide sequence that is hybridized to the target sequence within the target polynucleotide, and (2) the direct repeat sequence, wherein binding of the Cas effector module CRISPR-Cas effector module complex to the target polynucleotide induces cell death, thereby allowing one or more cell(s) in which one or more mutations have been introduced to be selected; this includes a split Cas effector module. In another preferred embodiment of the invention the cell to be selected may be a eukaryotic cell. Aspects of the invention allow for selection of specific cells without requiring a selection marker or a two-step process that may include a counter-selection system.

[0797] In one aspect, the invention provides a method of generating a eukaryotic cell comprising a modified or edited gene. In some embodiments, the modified or edited gene is a disease gene. In some embodiments, the method comprises (a) introducing one or more vectors into a eukaryotic cell, wherein the one or more vectors drive expression of one or more of: Cas effector module, and a guide sequence linked to a direct repeat sequence, wherein the Cas effector module associate one or more effector domains that mediate base editing, and (b) allowing a CRISPR-Cas effector module complex to bind to a target polynucleotide to effect base editing of the target polynucleotide within said disease gene, wherein the CRISPR-Cas effector module complex comprises a Cas effector module complexed with the guide sequence that is hybridized to the target sequence within the target polynucleotide, wherein the guide sequence may be designed to introduce one or more mismatches between the DNA/RNA heteroduplex or the RNA/RNA duplex formed between the guide sequence and the target sequence. In particular embodiments, the mismatch is an A-C mismatch. In some embodiments, the Cas effector may associate with one or more functional domains (e.g. via fusion protein or suitable linkers). In some embodiments, the effector domain comprises one or more cytidine or adenosine deaminases that mediate endogenous editing of via hydrolytic deamination. In particular embodiments, the effector domain comprises the adenosine deaminase acting on RNA (ADAR) family of enzymes. In particular embodiments, the adenosine deaminase protein or catalytic domain thereof capable of deaminating adenosine or cytidine in RNA or is an RNA specific adenosine deaminase and/or is a bacterial, human, cephalopod, or Drosophila adenosine deaminase protein or catalytic domain thereof, preferably TadA, more preferably ADAR, optionally huADAR, optionally (hu)ADAR1 or (hu)ADAR2, preferably huADAR2 or catalytic domain thereof. In some embodiments, the cytidine deaminase is a human, rat or lamprey cytidine deaminase. In some embodiments, the cytidine deaminase is an apolipoprotein B mRNA-editing complex (APOBEC) family deaminase, an activation-induced deaminase (AID), or a cytidine deaminase 1 (CDA1).

[0798] A further aspect relates to an isolated cell obtained or obtainable from the methods described above and/or comprising the composition described above or progeny of said modified cell, preferably wherein said cell comprises a hypoxanthine or a guanine in replace of said Adenine in said target RNA of interest compared to a corresponding cell not subjected to the method. In particular embodiments, the cell is a eukaryotic cell, preferably a human or non-human animal cell, optionally a therapeutic T cell or an antibody-producing B-cell or wherein said cell is a plant cell. A further aspect provides a non-human animal or a plant comprising said modified cell or progeny thereof. Yet a further aspect provides the modified cell as described hereinabove for use in therapy, preferably cell therapy.

[0799] In some embodiments, the modified cell is a therapeutic T cell, such as a T cell suitable for CAR-T therapies. The modification may result in one or more desirable traits in the therapeutic T cell, including but not limited to, reduced expression of an immune checkpoint receptor (e.g., PDA, CTLA4), reduced expression of HLA proteins (e.g., B2M, HLA-A), and reduced expression of an endogenous TCR.

[0800] The invention further relates to a method for cell therapy, comprising administering to a patient in need thereof the modified cell described herein, wherein the presence of the modified cell remedies a disease in the patient. In one embodiment, the modified cell for cell therapy is a CAR-T cell capable of recognizing and/or attacking a tumor cell. In another embodiment, the modified cell for cell therapy is a stem cell, such as a neural stem cell, a mesenchymal stem cell, a hematopoietic stem cell, or an iPSC cell.

[0801] Compositions comprising a Cas effector module, complex or system comprising multiple guide RNAs, preferably tandemly arranged, or the polynucleotide or vector encoding or comprising said Cas effector module, complex or system comprising multiple guide RNAs, preferably tandemly arranged, for use in the methods of treatment as defined herein elsewhere are also provided. A kit of parts may be provided including such compositions. Use of said composition in the manufacture of a medicament for such methods of treatment are also provided. Use of a Cas effector module CRISPR system in screening is also provided by the present invention, e.g., gain of function screens. Cells which are artificially forced to overexpress a gene are be able to down regulate the gene over time (re-establishing equilibrium) e.g. by negative feedback loops. By the time the screen starts the unregulated gene might be reduced again. Using an inducible Cas effector module activator allows one to induce transcription right before the screen and therefore minimizes the chance of false negative hits. Accordingly, by use of the instant invention in screening, e.g., gain of function screens, the chance of false negative results may be minimized.

[0802] In another aspect, the invention provides an engineered, non-naturally occurring vector system comprising one or more vectors comprising a first regulatory element operably linked to the multiple Cas12b CRISPR system guide RNAs that each specifically target a DNA molecule encoding a gene product and a second regulatory element operably linked coding for a CRISPR protein. Both regulatory elements may be located on the same vector or on different vectors of the system. The multiple guide RNAs target the multiple DNA molecules encoding the multiple gene products in a cell and the CRISPR protein may cleave the multiple DNA molecules encoding the gene products (it may cleave one or both strands or have substantially no nuclease activity), whereby expression of the multiple gene products is altered; and, wherein the CRISPR protein and the multiple guide RNAs do not naturally occur together. In a preferred embodiment the CRISPR protein is Cas12b protein, optionally codon optimized for expression in a eukaryotic cell. In a preferred embodiment the eukaryotic cell is a mammalian cell, a plant cell or a yeast cell and in a more preferred embodiment the mammalian cell is a human cell. In a further embodiment of the invention, the expression of each of the multiple gene products is altered, preferably decreased.

[0803] In one aspect, the invention provides a vector system comprising one or more vectors. In some embodiments, the system comprises: (a) a first regulatory element operably linked to a direct repeat sequence and one or more insertion sites for inserting one or more guide sequences up- or downstream (whichever applicable) of the direct repeat sequence, wherein when expressed, the one or more guide sequence(s) direct(s) sequence-specific binding of the CRISPR complex to the one or more target sequence(s) in a eukaryotic cell, wherein the CRISPR complex comprises a Cas12b enzyme complexed with the one or more guide sequence(s) that is hybridized to the one or more target sequence(s); and (b) a second regulatory element operably linked to an enzyme-coding sequence encoding said Cas12b enzyme, preferably comprising at least one nuclear localization sequence and/or at least one NES; wherein components (a) and (b) are located on the same or different vectors of the system. Where applicable, a tracr sequence may also be provided. In some embodiments, component (a) further comprises two or more guide sequences operably linked to the first regulatory element, wherein when expressed, each of the two or more guide sequences direct sequence specific binding of a Cas12b CRISPR complex to a different target sequence in a eukaryotic cell. In some embodiments, the CRISPR complex comprises one or more nuclear localization sequences and/or one or more NES of sufficient strength to drive accumulation of said Cas12b CRISPR complex in a detectable amount in or out of the nucleus of a eukaryotic cell. In some embodiments, the first regulatory element is a polymerase III promoter. In some embodiments, the second regulatory element is a polymerase II promoter. In some embodiments, each of the guide sequences is at least 16, 17, 18, 19, 20, 25 nucleotides, or between 16-30, or between 16-25, or between 16-20 nucleotides in length.

[0804] Recombinant expression vectors can comprise the polynucleotides encoding the Cas12b enzyme, system or complex for use in multiple targeting as defined herein in a form suitable for expression of the nucleic acid in a host cell, which means that the recombinant expression vectors include one or more regulatory elements, which may be selected on the basis of the host cells to be used for expression, that is operatively-linked to the nucleic acid sequence to be expressed. Within a recombinant expression vector, “operably linked” is intended to mean that the nucleotide sequence of interest is linked to the regulatory element(s) in a manner that allows for expression of the nucleotide sequence (e.g., in an in vitro transcription/translation system or in a host cell when the vector is introduced into the host cell).

[0805] In some embodiments, a host cell is transiently or non-transiently transfected with one or more vectors comprising the polynucleotides encoding the Cas12b enzyme, system or complex for use in multiple targeting as defined herein. In some embodiments, a cell is transfected as it naturally occurs in a subject. In some embodiments, a cell that is transfected is taken from a subject. In some embodiments, the cell is derived from cells taken from a subject, such as a cell line. A wide variety of cell lines for tissue culture are known in the art and exemplified herein elsewhere. Cell lines are available from a variety of sources known to those with skill in the art (see, e.g., the American Type Culture Collection (ATCC) (Manassas, Va.)). In some embodiments, a cell transfected with one or more vectors comprising the polynucleotides encoding the Cas12b enzyme, system or complex for use in multiple targeting as defined herein is used to establish a new cell line comprising one or more vector-derived sequences. In some embodiments, a cell transiently transfected with the components of a Cas12b CRISPR system or complex for use in multiple targeting as described herein (such as by transient transfection of one or more vectors, or transfection with RNA), and modified through the activity of a Cas12b CRISPR system or complex, is used to establish a new cell line comprising cells containing the modification but lacking any other exogenous sequence. In some embodiments, cells transiently or non-transiently transfected with one or more vectors comprising the polynucleotides encoding the Cas12b enzyme, system or complex for use in multiple targeting as defined herein, or cell lines derived from such cells are used in assessing one or more test compounds.

[0806] The term “regulatory element” is as defined herein elsewhere.

[0807] Advantageous vectors include lentiviruses and adeno-associated viruses, and types of such vectors can also be selected for targeting particular types of cells.

[0808] In one aspect, the invention provides a eukaryotic host cell comprising (a) a first regulatory element operably linked to a direct repeat sequence and one or more insertion sites for inserting one or more guide RNA sequences up- or downstream (whichever applicable) of the direct repeat sequence, wherein when expressed, the guide sequence(s) direct(s) sequence-specific binding of the Cas12b CRISPR complex to the respective target sequence(s) in a eukaryotic cell, wherein the Cas12b CRISPR complex comprises a Cas12b enzyme complexed with the one or more guide sequence(s) that is hybridized to the respective target sequence(s); and/or (b) a second regulatory element operably linked to an enzyme-coding sequence encoding said Cas12b enzyme comprising preferably at least one nuclear localization sequence and/or NES. In some embodiments, the host cell comprises components (a) and (b). Where applicable, a tracr sequence may also be provided. In some embodiments, component (a), component (b), or components (a) and (b) are stably integrated into a genome of the host eukaryotic cell. In some embodiments, component (a) further comprises two or more guide sequences operably linked to the first regulatory element, and optionally separated by a direct repeat, wherein when expressed, each of the two or more guide sequences direct sequence specific binding of a Cas12b CRISPR complex to a different target sequence in a eukaryotic cell. In some embodiments, the Cas12b enzyme comprises one or more nuclear localization sequences and/or nuclear export sequences or NES of sufficient strength to drive accumulation of said CRISPR enzyme in a detectable amount in and/or out of the nucleus of a eukaryotic cell.

[0809] In some embodiments, the guide molecule forms a duplex with a target DNA strand comprising at least one target adenosine residues to be edited. Upon hybridization of the guide RNA molecule to the target DNA strand, the adenosine deaminase binds to the duplex and catalyzes deamination of one or more target adenosine residues comprised within the DNA-RNA duplex.

[0810] Further, engineering of the PAM Interacting (PI) domain may allow programing of PAM specificity, improve target site recognition fidelity, and increase the versatility of the CRISPR-Cas protein, for example as described for Cas9 in Kleinstiver B P et al. Engineered CRISPR-Cas9 nucleases with altered PAM specificities. Nature. 2015 Jul. 23; 523(7561):481-5. doi: 10.1038/nature14592. As further detailed herein, the skilled person will understand that C2c1 proteins may be modified analogously.

[0811] In particular embodiments, the guide sequence is selected in order to ensure optimal efficiency of the deaminase on the adenine to be deaminated. The position of the adenine in the target strand relative to the cleavage site of the C2c1 nickase may be taken into account. In particular embodiments it is of interest to ensure that the nickase will act in the vicinity of the adenine to be deaminated, on the non-target strand. For instance, in particular embodiments, the Cas12b nickase cuts the non-targeting strand downstream of the PAM and it can be of interest to design the guide that the cytosine which is to correspond to the adenine to be deaminated is located in the guide sequence within 10 bp upstream or downstream of the nickase cleavage site in the sequence of the corresponding non-target strand.

### Delivery

[0812] In some embodiments, the components of the CRISPR-Cas system may be delivered in various form, such as combinations of DNA/RNA or RNA/RNA or protein RNA. For example, the C2c1 protein may be delivered as a DNA-coding polynucleotide or an RNA-coding polynucleotide or as a protein. The guide may be delivered may be delivered as a DNA-coding polynucleotide or an RNA. All possible combinations are envisioned, including mixed forms of delivery.

[0813] In some aspects, the invention provides methods comprising delivering one or more polynucleotides, such as or one or more vectors as described herein, one or more transcripts thereof, and/or one or proteins transcribed therefrom, to a host cell.

### Vectors as Delivery Vehicles

[0814] Recombinant expression vectors can comprise a nucleic acid of the invention in a form suitable for expression of the nucleic acid in a host cell, which means that the recombinant expression vectors include one or more regulatory elements, which may be selected on the basis of the host cells to be used for expression, that is operatively-linked to the nucleic acid sequence to be expressed. Within a recombinant expression vector, “operably linked” is intended to mean that the nucleotide sequence of interest is linked to the regulatory element(s) in a manner that allows for expression of the nucleotide sequence (e.g., in an in vitro transcription/translation system or in a host cell when the vector is introduced into the host cell). Advantageous vectors include lentiviruses and adeno-associated viruses, and types of such vectors can also be selected for targeting particular types of cells.

[0815] With regards to recombination and cloning methods, mention is made of U.S. patent application Ser. No. 10/815,730, published Sep. 2, 2004 as US 2004-0171156 A1, the contents of which are herein incorporated by reference in their entirety.

[0816] The term “regulatory element” is intended to include promoters, enhancers, internal ribosomal entry sites (IRES), and other expression control elements (e.g., transcription termination signals, such as polyadenylation signals and poly-U sequences). Such regulatory elements are described, for example, in Goeddel, GENE EXPRESSION TECHNOLOGY: METHODS IN ENZYMOLOGY 185, Academic Press, San Diego, Calif. (1990). Regulatory elements include those that direct constitutive expression of a nucleotide sequence in many types of host cell and those that direct expression of the nucleotide sequence only in certain host cells (e.g., tissue-specific regulatory sequences). A tissue-specific promoter may direct expression primarily in a desired tissue of interest, such as muscle, neuron, bone, skin, blood, specific organs (e.g., liver, pancreas), or particular cell types (e.g., lymphocytes). Regulatory elements may also direct expression in a temporal-dependent manner, such as in a cell-cycle dependent or developmental stage-dependent manner, which may or may not also be tissue or cell-type specific. In some embodiments, a vector comprises one or more pol III promoter (e.g., 1, 2, 3, 4, 5, or more pol III promoters), one or more pol II promoters (e.g., 1, 2, 3, 4, 5, or more pol II promoters), one or more pol I promoters (e.g., 1, 2, 3, 4, 5, or more pol I promoters), or combinations thereof. Examples of pol III promoters include, but are not limited to, U6 and H1 promoters. Examples of pol II promoters include, but are not limited to, the retroviral Rous sarcoma virus (RSV) LTR promoter (optionally with the RSV enhancer), the cytomegalovirus (CMV) promoter (optionally with the CMV enhancer) [see, e.g., Boshart et al, Cell, 41:521-530 (1985)], the SV40 promoter, the dihydrofolate reductase promoter, the -actin promoter, the phosphoglycerol kinase (PGK) promoter, and the EF1α promoter. Also encompassed by the term “regulatory element” are enhancer elements, such as WPRE; CMV enhancers; the R-U5′ segment in LTR of HTLV-I (Mol. Cell. Biol., Vol. 8(1), p. 466-472, 1988); SV40 enhancer; and the intron sequence between exons 2 and 3 of rabbit β-globin (Proc. Natl. Acad. Sci. USA., Vol. 78(3), p. 1527-31, 1981). It will be appreciated by those skilled in the art that the design of the expression vector can depend on such factors as the choice of the host cell to be transformed, the level of expression desired, etc. A vector can be introduced into host cells to thereby produce transcripts, proteins, or peptides, including fusion proteins or peptides, encoded by nucleic acids as described herein (e.g., clustered regularly interspersed short palindromic repeats (CRISPR) transcripts, proteins, enzymes, mutant forms thereof, fusion proteins thereof, etc.). With regards to regulatory sequences, mention is made of U.S. patent application Ser. No. 10/491,026, the contents of which are incorporated by reference herein in their entirety. With regards to promoters, mention is made of PCT publication WO 2011/028929 and U.S. application Ser. No. 12/511,940, the contents of which are incorporated by reference herein in their entirety.

[0817] Advantageous vectors include lentiviruses and adeno-associated viruses, and types of such vectors can also be selected for targeting particular types of cells.

[0818] In particular embodiments, use is made of bicistronic vectors for the guide RNA and (optionally modified or mutated) the CRISPR-Cas protein fused to adenosine deaminase. Bicistronic expression vectors for guide RNA and (optionally modified or mutated) CRISPR-Cas protein fused to adenosine deaminase are preferred. In general and particularly in this embodiment, (optionally modified or mutated) CRISPR-Cas protein fused to adenosine deaminase is preferably driven by the CBh promoter. The RNA may preferably be driven by a Pol III promoter, such as a U6 promoter. Ideally the two are combined.

[0819] Vectors can be designed for expression of CRISPR transcripts (e.g. nucleic acid transcripts, proteins, or enzymes) in prokaryotic or eukaryotic cells. For example, CRISPR transcripts can be expressed in bacterial cells such as Escherichia coli, insect cells (using baculovirus expression vectors), yeast cells, or mammalian cells. Suitable host cells are discussed further in Goeddel, GENE EXPRESSION TECHNOLOGY: METHODS IN ENZYMOLOGY 185, Academic Press, San Diego, Calif. (1990). Alternatively, the recombinant expression vector can be transcribed and translated in vitro, for example using T7 promoter regulatory sequences and T7 polymerase.

[0820] Vectors may be introduced and propagated in a prokaryote or prokaryotic cell. In some embodiments, a prokaryote is used to amplify copies of a vector to be introduced into a eukaryotic cell or as an intermediate vector in the production of a vector to be introduced into a eukaryotic cell (e.g. amplifying a plasmid as part of a viral vector packaging system). In some embodiments, a prokaryote is used to amplify copies of a vector and express one or more nucleic acids, such as to provide a source of one or more proteins for delivery to a host cell or host organism. Expression of proteins in prokaryotes is most often carried out in Escherichia coli with vectors containing constitutive or inducible promoters directing the expression of either fusion or non-fusion proteins. Fusion vectors add a number of amino acids to a protein encoded therein, such as to the amino terminus of the recombinant protein. Such fusion vectors may serve one or more purposes, such as: (i) to increase expression of recombinant protein; (ii) to increase the solubility of the recombinant protein; and (iii) to aid in the purification of the recombinant protein by acting as a ligand in affinity purification. Often, in fusion expression vectors, a proteolytic cleavage site is introduced at the junction of the fusion moiety and the recombinant protein to enable separation of the recombinant protein from the fusion moiety subsequent to purification of the fusion protein. Such enzymes, and their cognate recognition sequences, include Factor Xa, thrombin and enterokinase. Example fusion expression vectors include pGEX (Pharmacia Biotech Inc; Smith and Johnson, 1988. Gene 67: 31-40), pMAL (New England Biolabs, Beverly, Mass.) and pRIT5 (Pharmacia, Piscataway, N.J.) that fuse glutathione S-transferase (GST), maltose E binding protein, or protein A, respectively, to the target recombinant protein. Examples of suitable inducible non-fusion E. coli expression vectors include pTrc (Amrann et al., (1988) Gene 69:301-315) and pET lid (Studier et al., GENE EXPRESSION TECHNOLOGY: METHODS IN ENZYMOLOGY 185, Academic Press, San Diego, Calif. (1990) 60-89). In some embodiments, a vector is a yeast expression vector. Examples of vectors for expression in yeast Saccharomyces cerivisae include pYepSecl (Baldari, et al., 1987. EMBO J. 6: 229-234), pMFa (Kuijan and Herskowitz, 1982. Cell 30: 933-943), pJRY88 (Schultz et al., 1987. Gene 54: 113-123), pYES2 (Invitrogen Corporation, San Diego, Calif.), and picZ (InVitrogen Corp, San Diego, Calif.). In some embodiments, a vector drives protein expression in insect cells using baculovirus expression vectors. Baculovirus vectors available for expression of proteins in cultured insect cells (e.g., SF9 cells) include the pAc series (Smith, et al., 1983. Mol. Cell. Biol. 3: 2156-2165) and the pVL series (Lucklow and Summers, 1989. Virology 170: 31-39).

[0821] In some embodiments, a vector is capable of driving expression of one or more sequences in mammalian cells using a mammalian expression vector. Examples of mammalian expression vectors include pCDM8 (Seed, 1987. Nature 329: 840) and pMT2PC (Kaufman, et al., 1987. EMBO J. 6: 187-195). When used in mammalian cells, the expression vector's control functions are typically provided by one or more regulatory elements. For example, commonly used promoters are derived from polyoma, adenovirus 2, cytomegalovirus, simian virus 40, and others disclosed herein and known in the art. For other suitable expression systems for both prokaryotic and eukaryotic cells see, e.g., Chapters 16 and 17 of Sambrook, et al., MOLECULAR CLONING: A LABORATORY MANUAL. 2nd ed., Cold Spring Harbor Laboratory, Cold Spring Harbor Laboratory Press, Cold Spring Harbor, N.Y., 1989.

[0822] In some embodiments, the recombinant mammalian expression vector is capable of directing expression of the nucleic acid preferentially in a particular cell type (e.g., tissue-specific regulatory elements are used to express the nucleic acid). Tissue-specific regulatory elements are known in the art. Non-limiting examples of suitable tissue-specific promoters include the albumin promoter (liver-specific; Pinkert, et al., 1987. Genes Dev. 1: 268-277), lymphoid-specific promoters (Calame and Eaton, 1988. Adv. Immunol. 43: 235-275), in particular promoters of T cell receptors (Winoto and Baltimore, 1989. EMBO J. 8: 729-733) and immunoglobulins (Baneiji, et al., 1983. Cell 33: 729-740; Queen and Baltimore, 1983. Cell 33: 741-748), neuron-specific promoters (e.g., the neurofilament promoter; Byrne and Ruddle, 1989. Proc. Natl. Acad. Sci. USA 86: 5473-5477), pancreas-specific promoters (Edlund, et al., 1985. Science 230: 912-916), and mammary gland-specific promoters (e.g., milk whey promoter; U.S. Pat. No. 4,873,316 and European Application Publication No. 264,166). Developmentally-regulated promoters are also encompassed, e.g., the murine hox promoters (Kessel and Gruss, 1990. Science 249: 374-379) and the α-fetoprotein promoter (Campes and Tilghman, 1989. Genes Dev. 3: 537-546). With regards to these prokaryotic and eukaryotic vectors, mention is made of U.S. Pat. No. 6,750,059, the contents of which are incorporated by reference herein in their entirety. Other embodiments of the invention may relate to the use of viral vectors, with regards to which mention is made of U.S. patent application Ser. No. 13/092,085, the contents of which are incorporated by reference herein in their entirety. Tissue-specific regulatory elements are known in the art and in this regard, mention is made of U.S. Pat. No. 7,776,321, the contents of which are incorporated by reference herein in their entirety. In some embodiments, a regulatory element is operably linked to one or more elements of a CRISPR system so as to drive expression of the one or more elements of the CRISPR system.

[0823] In some embodiments, one or more vectors driving expression of one or more elements of a nucleic acid-targeting system are introduced into a host cell such that expression of the elements of the nucleic acid-targeting system direct formation of a nucleic acid-targeting complex at one or more target sites. For example, a nucleic acid-targeting effector enzyme and a nucleic acid-targeting guide RNA could each be operably linked to separate regulatory elements on separate vectors. RNA(s) of the nucleic acid-targeting system can be delivered to a transgenic nucleic acid-targeting effector protein animal or mammal, e.g., an animal or mammal that constitutively or inducibly or conditionally expresses nucleic acid-targeting effector protein; or an animal or mammal that is otherwise expressing nucleic acid-targeting effector proteins or has cells containing nucleic acid-targeting effector proteins, such as by way of prior administration thereto of a vector or vectors that code for and express in vivo nucleic acid-targeting effector proteins. Alternatively, two or more of the elements expressed from the same or different regulatory elements, may be combined in a single vector, with one or more additional vectors providing any components of the nucleic acid-targeting system not included in the first vector. nucleic acid-targeting system elements that are combined in a single vector may be arranged in any suitable orientation, such as one element located 5′ with respect to (“upstream” of) or 3′ with respect to (“downstream” of) a second element. The coding sequence of one element may be located on the same or opposite strand of the coding sequence of a second element, and oriented in the same or opposite direction. In some embodiments, a single promoter drives expression of a transcript encoding a nucleic acid-targeting effector protein and the nucleic acid-targeting guide RNA, embedded within one or more intron sequences (e.g., each in a different intron, two or more in at least one intron, or all in a single intron). In some embodiments, the nucleic acid-targeting effector protein and the nucleic acid-targeting guide RNA may be operably linked to and expressed from the same promoter. Delivery vehicles, vectors, particles, nanoparticles, formulations and components thereof for expression of one or more elements of a nucleic acid-targeting system are as used in the foregoing documents, such as WO 2014/093622 (PCT/US2013/074667). In some embodiments, a vector comprises one or more insertion sites, such as a restriction endonuclease recognition sequence (also referred to as a “cloning site”). In some embodiments, one or more insertion sites (e.g., about or more than about 1, 2, 3, 4, 5, 6, 7, 8, 9, 10, or more insertion sites) are located upstream and/or downstream of one or more sequence elements of one or more vectors. When multiple different guide sequences are used, a single expression construct may be used to target nucleic acid-targeting activity to multiple different, corresponding target sequences within a cell. For example, a single vector may comprise about or more than about 1, 2, 3, 4, 5, 6, 7, 8, 9, 10, 15, 20, or more guide sequences. In some embodiments, about or more than about 1, 2, 3, 4, 5, 6, 7, 8, 9, 10, or more such guide-sequence-containing vectors may be provided, and optionally delivered to a cell. In some embodiments, a vector comprises a regulatory element operably linked to an enzyme-coding sequence encoding a nucleic acid-targeting effector protein. Nucleic acid-targeting effector protein or nucleic acid-targeting guide RNA or RNA(s) can be delivered separately; and advantageously at least one of these is delivered via a particle complex. nucleic acid-targeting effector protein mRNA can be delivered prior to the nucleic acid-targeting guide RNA to give time for nucleic acid-targeting effector protein to be expressed. Nucleic acid-targeting effector protein mRNA might be administered 1-12 hours (preferably around 2-6 hours) prior to the administration of nucleic acid-targeting guide RNA. Alternatively, nucleic acid-targeting effector protein mRNA and nucleic acid-targeting guide RNA can be administered together. Advantageously, a second booster dose of guide RNA can be administered 1-12 hours (preferably around 2-6 hours) after the initial administration of nucleic acid-targeting effector protein mRNA+guide RNA. Additional administrations of nucleic acid-targeting effector protein mRNA and/or guide RNA might be useful to achieve the most efficient levels of genome modification.

[0824] Conventional viral and non-viral based gene transfer methods can be used to introduce nucleic acids in mammalian cells or target tissues. Such methods can be used to administer nucleic acids encoding components of a nucleic acid-targeting system to cells in culture, or in a host organism. Non-viral vector delivery systems include DNA plasmids, RNA (e.g. a transcript of a vector described herein), naked nucleic acid, and nucleic acid complexed with a delivery vehicle, such as a liposome. Viral vector delivery systems include DNA and RNA viruses, which have either episomal or integrated genomes after delivery to the cell. For a review of gene therapy procedures, see Anderson, Science 256:808-813 (1992); Nabel & Felgner, TIBTECH 11:211-217 (1993); Mitani & Caskey, TIBTECH 11:162-166 (1993); Dillon, TIBTECH 11:167-175 (1993); Miller, Nature 357:455-460 (1992); Van Brunt, Biotechnology 6(10):1149-1154 (1988); Vigne, Restorative Neurology and Neuroscience 8:35-36 (1995); Kremer & Perricaudet, British Medical Bulletin 51(1):31-44 (1995); Haddada et al., in Current Topics in Microbiology and Immunology, Doerfler and Bohm (eds) (1995); and Yu et al., Gene Therapy 1:13-26 (1994).

[0825] Methods of non-viral delivery of nucleic acids include lipofection, nucleofection, microinjection, biolistics, virosomes, liposomes, immunoliposomes, polycation or lipid:nucleic acid conjugates, naked DNA, artificial virions, and agent-enhanced uptake of DNA. Lipofection is described in e.g., U.S. Pat. Nos. 5,049,386, 4,946,787; and 4,897,355) and lipofection reagents are sold commercially (e.g., Transfectam™ and Lipofectin™) Cationic and neutral lipids that are suitable for efficient receptor-recognition lipofection of polynucleotides include those of Felgner, WO 91/17424; WO 91/16024. Delivery can be to cells (e.g. in vitro or ex vivo administration) or target tissues (e.g. in vivo administration).

[0826] Plasmid delivery involves the cloning of a guide RNA into a CRISPR-Cas protein expressing plasmid and transfecting the DNA in cell culture. Plasmid backbones are available commercially and no specific equipment is required. They have the advantage of being modular, capable of carrying different sizes of CRISPR-Cas coding sequences (including those encoding larger sized proteins) as well as selection markers. Both an advantage of plasmids is that they can ensure transient, but sustained expression. However, delivery of plasmids is not straightforward such that in vivo efficiency is often low. The sustained expression can also be disadvantageous in that it can increase off-target editing. In addition excess build-up of the CRISPR-Cas protein can be toxic to the cells. Finally, plasmids always hold the risk of random integration of the dsDNA in the host genome, more particularly in view of the double-stranded breaks being generated (on and off-target).

[0827] The preparation of lipid:nucleic acid complexes, including targeted liposomes such as immunolipid complexes, is well known to one of skill in the art (see, e.g., Crystal, Science 270:404-410 (1995); Blaese et al., Cancer Gene Ther. 2:291-297 (1995); Behr et al., Bioconjugate Chem. 5:382-389 (1994); Remy et al., Bioconjugate Chem. 5:647-654 (1994); Gao et al., Gene Therapy 2:710-722 (1995); Ahmad et al., Cancer Res. 52:4817-4820 (1992); U.S. Pat. Nos. 4,186,183, 4,217,344, 4,235,871, 4,261,975, 4,485,054, 4,501,728, 4,774,085, 4,837,028, and 4,946,787). This is discussed more in detail below.

[0828] The use of RNA or DNA viral based systems for the delivery of nucleic acids takes advantage of highly evolved processes for targeting a virus to specific cells in the body and trafficking the viral payload to the nucleus. Viral vectors can be administered directly to patients (in vivo) or they can be used to treat cells in vitro, and the modified cells may optionally be administered to patients (ex vivo). Conventional viral based systems could include retroviral, lentivirus, adenoviral, adeno-associated and herpes simplex virus vectors for gene transfer. Integration in the host genome is possible with the retrovirus, lentivirus, and adeno-associated virus gene transfer methods, often resulting in long term expression of the inserted transgene. Additionally, high transduction efficiencies have been observed in many different cell types and target tissues.

[0829] The tropism of a retrovirus can be altered by incorporating foreign envelope proteins, expanding the potential target population of target cells. Lentiviral vectors are retroviral vectors that are able to transduce or infect non-dividing cells and typically produce high viral titers. Selection of a retroviral gene transfer system would therefore depend on the target tissue. Retroviral vectors are comprised of cis-acting long terminal repeats with packaging capacity for up to 6-10 kb of foreign sequence. The minimum cis-acting LTRs are sufficient for replication and packaging of the vectors, which are then used to integrate the therapeutic gene into the target cell to provide permanent transgene expression. Widely used retroviral vectors include those based upon murine leukemia virus (MuLV), gibbon ape leukemia virus (GaLV), Simian Immuno deficiency virus (SIV), human immuno deficiency virus (HIV), and combinations thereof (see, e.g., Buchscher et al., J. Virol. 66:2731-2739 (1992); Johann et al., J. Virol. 66:1635-1640 (1992); Sommnerfelt et al., Virol. 176:58-59 (1990); Wilson et al., J. Virol. 63:2374-2378 (1989); Miller et al., J. Virol. 65:2220-2224 (1991); PCT/US94/05700).

[0830] In applications where transient expression is preferred, adenoviral based systems may be used. Adenoviral based vectors are capable of very high transduction efficiency in many cell types and do not require cell division. With such vectors, high titer and levels of expression have been obtained. This vector can be produced in large quantities in a relatively simple system. Adeno-associated virus (“AAV”) vectors may also be used to transduce cells with target nucleic acids, e.g., in the in vitro production of nucleic acids and peptides, and for in vivo and ex vivo gene therapy procedures (see, e.g., West et al., Virology 160:38-47 (1987); U.S. Pat. No. 4,797,368; WO 93/24641; Kotin, Human Gene Therapy 5:793-801 (1994); Muzyczka, J. Clin. Invest. 94:1351 (1994). Construction of recombinant AAV vectors are described in a number of publications, including U.S. Pat. No. 5,173,414; Tratschin et al., Mol. Cell. Biol. 5:3251-3260 (1985); Tratschin, et al., Mol. Cell. Biol. 4:2072-2081 (1984); Hermonat & Muzyczka, PNAS 81:6466-6470 (1984); and Samulski et al., J. Virol. 63:03822-3828 (1989).

[0831] The invention provides AAV that contains or consists essentially of an exogenous nucleic acid molecule encoding a CRISPR system, e.g., a plurality of cassettes comprising or consisting a first cassette comprising or consisting essentially of a promoter, a nucleic acid molecule encoding a CRISPR-associated (Cas) protein (putative nuclease or helicase proteins), e.g., C2c1 and a terminator, and one or more, advantageously up to the packaging size limit of the vector, e.g., in total (including the first cassette) five, cassettes comprising or consisting essentially of a promoter, nucleic acid molecule encoding guide RNA (gRNA) and a terminator (e.g., each cassette schematically represented as Promoter-gRNA1-terminator, Promoter-gRNA2-terminator . . . Promoter-gRNA(N)-terminator, where N is a number that can be inserted that is at an upper limit of the packaging size limit of the vector), or two or more individual rAAVs, each containing one or more than one cassette of a CRISPR system, e.g., a first rAAV containing the first cassette comprising or consisting essentially of a promoter, a nucleic acid molecule encoding Cas, e.g., Cas (C2c1) and a terminator, and a second rAAV containing one or more cassettes each comprising or consisting essentially of a promoter, nucleic acid molecule encoding guide RNA (gRNA) and a terminator (e.g., each cassette schematically represented as Promoter-gRNA1-terminator, Promoter-gRNA2-terminator . . . Promoter-gRNA(N)-terminator, where N is a number that can be inserted that is at an upper limit of the packaging size limit of the vector). Alternatively, because C2c1 can process its own crRNA/gRNA, a single crRNA/gRNA array can be used for multiplex gene editing. Hence, instead of including multiple cassettes to deliver the gRNAs, the rAAV may contain a single cassette comprising or consisting essentially of a promoter, a plurality of crRNA/gRNA, and a terminator (e.g., schematically represented as Promoter-gRNA1-gRNA2 . . . gRNA(N)-terminator, where N is a number that can be inserted that is at an upper limit of the packaging size limit of the vector). See Zetsche et al Nature Biotechnology 35, 31-34 (2017), which is incorporated herein by reference in its entirety. As rAAV is a DNA virus, the nucleic acid molecules in the herein discussion concerning AAV or rAAV are advantageously DNA. The promoter is in some embodiments advantageously human Synapsin I promoter (hSyn). Additional methods for the delivery of nucleic acids to cells are known to those skilled in the art. See, for example, US20030087817, incorporated herein by reference.

[0832] In another embodiment, Cocal vesiculovirus envelope pseudotyped retroviral vector particles are contemplated (see, e.g., US Patent Publication No. 20120164118 assigned to the Fred Hutchinson Cancer Research Center). Cocal virus is in the Vesiculovirus genus, and is a causative agent of vesicular stomatitis in mammals. Cocal virus was originally isolated from mites in Trinidad (Jonkers et al., Am. J. Vet. Res. 25:236-242 (1964)), and infections have been identified in Trinidad, Brazil, and Argentina from insects, cattle, and horses. Many of the vesiculoviruses that infect mammals have been isolated from naturally infected arthropods, suggesting that they are vector-borne. Antibodies to vesiculoviruses are common among people living in rural areas where the viruses are endemic and laboratory-acquired; infections in humans usually result in influenza-like symptoms. The Cocal virus envelope glycoprotein shares 71.5% identity at the amino acid level with VSV-G Indiana, and phylogenetic comparison of the envelope gene of vesiculoviruses shows that Cocal virus is serologically distinct from, but most closely related to, VSV-G Indiana strains among the vesiculoviruses. Jonkers et al., Am. J. Vet. Res. 25:236-242 (1964) and Travassos da Rosa et al., Am. J. Tropical Med. & Hygiene 33:999-1006 (1984). The Cocal vesiculovirus envelope pseudotyped retroviral vector particles may include for example, lentiviral, alpharetroviral, betaretroviral, gammaretroviral, deltaretroviral, and epsilonretroviral vector particles that may comprise retroviral Gag, Pol, and/or one or more accessory protein(s) and a Cocal vesiculovirus envelope protein. Within certain aspects of these embodiments, the Gag, Pol, and accessory proteins are lentiviral and/or gammaretroviral.

[0833] In some embodiments, a host cell is transiently or non-transiently transfected with one or more vectors described herein. In some embodiments, a cell is transfected as it naturally occurs in a subject optionally to be reintroduced therein. In some embodiments, a cell that is transfected is taken from a subject. In some embodiments, the cell is derived from cells taken from a subject, such as a cell line. A wide variety of cell lines for tissue culture are known in the art. Examples of cell lines include, but are not limited to, C8161, CCRF-CEM, MOLT, mIMCD-3, NHDF, HeLa-S3, Huh1, Huh4, Huh7, HUVEC, HASMC, HEKn, HEKa, MiaPaCell, Panc1, PC-3, TF1, CTLL-2, ClR, Rat6, CV1, RPTE, A10, T24, J82, A375, ARH-77, Calul, SW480, SW620, SKOV3, SK-UT, CaCo2, P388D1, SEM-K2, WEHI-231, HB56, TI1B55, Jurkat, J45.01, LRMB, Bcl-1, BC-3, IC21, DLD2, Raw264.7, NRK, NRK-52E, MRC5, MEF, Hep G2, HeLa B, HeLa T4, COS, COS-1, COS-6, COS-M6A, BS-C-1 monkey kidney epithelial, BALB/3T3 mouse embryo fibroblast, 3T3 Swiss, 3T3-L1, 132-d5 human fetal fibroblasts; 10.1 mouse fibroblasts, 293-T, 3T3, 721, 9L, A2780, A2780ADR, A2780cis, A172, A20, A253, A431, A-549, ALC, B16, B35, BCP-1 cells, BEAS-2B, bEnd.3, BHK-21, BR 293, BxPC3, C3H-10T1/2, C6/36, Cal-27, CHO, CHO-7, CHO—IR, CHO-K1, CHO-K2, CHO-T, CHO Dhfr −/−, COR-L23, COR-L23/CPR, COR-L23/5010, COR-L23/R23, COS-7, COV-434, CML T1, CMT, CT26, D17, DH82, DU145, DuCaP, EL4, EM2, EM3, EMT6/AR1, EMT6/AR10.0, FM3, H1299, H69, HB54, HB55, HCA2, HEK-293, HeLa, Hepalclc7, HL-60, HMEC, HT-29, Jurkat, JY cells, K562 cells, Ku812, KCL22, KG1, KYO1, LNCap, Ma-Mel 1-48, MC-38, MCF-7, MCF-10A, MDA-MB-231, MDA-MB-468, MDA-MB-435, MDCK II, MDCK II, MOR/0.2R, MONO-MAC 6, MTD-1A, MyEnd, NCI-H69/CPR, NCI-H69/LX10, NCI-H69/LX20, NCI-H69/LX4, NIH-3T3, NALM-1, NW-145, OPCN/OPCT cell lines, Peer, PNT-1A/PNT 2, RenCa, RIN-5F, RMA/RMAS, Saos-2 cells, Sf-9, SkBr3, T2, T-47D, T84, THP1 cell line, U373, U87, U937, VCaP, Vero cells, WM39, WT-49, X63, YAC-1, YAR, and transgenic varieties thereof. Cell lines are available from a variety of sources known to those with skill in the art (see, e.g., the American Type Culture Collection (ATCC) (Manassas, Va.)).

[0834] In particular embodiments, transient expression and/or presence of one or more of the components of the AD-functionalized CRISPR system can be of interest, such as to reduce off-target effects. In some embodiments, a cell transfected with one or more vectors described herein is used to establish a new cell line comprising one or more vector-derived sequences. In some embodiments, a cell transiently transfected with the components of a AD-functionalized CRISPR system as described herein (such as by transient transfection of one or more vectors, or transfection with RNA), and modified through the activity of a CRISPR complex, is used to establish a new cell line comprising cells containing the modification but lacking any other exogenous sequence. In some embodiments, cells transiently or non-transiently transfected with one or more vectors described herein, or cell lines derived from such cells are used in assessing one or more test compounds.

[0835] In some embodiments it is envisaged to introduce the RNA and/or protein directly to the host cell. For instance, the CRISPR-Cas protein can be delivered as encoding mRNA together with an in vitro transcribed guide RNA. Such methods can reduce the time to ensure effect of the CRISPR-Cas protein and further prevents long-term expression of the CRISPR system components.

[0836] In some embodiments the RNA molecules of the invention are delivered in liposome or lipofectin formulations and the like and can be prepared by methods well known to those skilled in the art. Such methods are described, for example, in U.S. Pat. Nos. 5,593,972, 5,589,466, and 5,580,859, which are herein incorporated by reference. Delivery systems aimed specifically at the enhanced and improved delivery of siRNA into mammalian cells have been developed, (see, for example, Shen et al FEBS Let. 2003, 539:111-114; Xia et al., Nat. Biotech. 2002, 20:1006-1010; Reich et al., Mol. Vision. 2003, 9: 210-216; Sorensen et al., J. Mol. Biol. 2003, 327: 761-766; Lewis et al., Nat. Gen. 2002, 32: 107-108 and Simeoni et al., NAR 2003, 31, 11: 2717-2724) and may be applied to the present invention. siRNA has recently been successfully used for inhibition of gene expression in primates (see for example. Tolentino et al., Retina 24(4):660 which may also be applied to the present invention.

[0837] Indeed, RNA delivery is a useful method of in vivo delivery. It is possible to deliver CcC1, adenosine deaminase, and guide RNA into cells using liposomes or particles. Thus delivery of the CRISPR-Cas protein, such as a C2c1, the delivery of the adenosine deaminase (which may be fused to the CRISPR-Cas protein or an adaptor protein), and/or delivery of the RNAs of the invention may be in RNA form and via microvesicles, liposomes or particle or nanoparticles. For example, C2c1 mRNA, adenosine deaminase mRNA, and guide RNA can be packaged into liposomal particles for delivery in vivo. Liposomal transfection reagents such as lipofectamine from Life Technologies and other reagents on the market can effectively deliver RNA molecules into the liver.

[0838] Means of delivery of RNA also preferred include delivery of RNA via particles (Cho, S., Goldberg, M., Son, S., Xu, Q., Yang, F., Mei, Y., Bogatyrev, S., Langer, R. and Anderson, D., Lipid-like nanoparticles for small interfering RNA delivery to endothelial cells, Advanced Functional Materials, 19: 3112-3118, 2010) or exosomes (Schroeder, A., Levins, C., Cortez, C., Langer, R., and Anderson, D., Lipid-based nanotherapeutics for siRNA delivery, Journal of Internal Medicine, 267: 9-21, 2010, PMID: 20059641). Indeed, exosomes have been shown to be particularly useful in delivery siRNA, a system with some parallels to the CRISPR system. For instance, El-Andaloussi S, et al. (“Exosome-mediated delivery of siRNA in vitro and in vivo.” Nat Protoc. 2012 December; 7(12):2112-26. doi: 10.1038/nprot.2012.131. Epub 2012 Nov. 15.) describe how exosomes are promising tools for drug delivery across different biological barriers and can be harnessed for delivery of siRNA in vitro and in vivo. Their approach is to generate targeted exosomes through transfection of an expression vector, comprising an exosomal protein fused with a peptide ligand. The exosomes are then purified and characterized from transfected cell supernatant, then RNA is loaded into the exosomes. Delivery or administration according to the invention can be performed with exosomes, in particular but not limited to the brain. Vitamin E (α-tocopherol) may be conjugated with CRISPR Cas and delivered to the brain along with high density lipoprotein (HDL), for example in a similar manner as was done by Uno et al. (HUMAN GENE THERAPY 22:711-719 (June 2011)) for delivering short-interfering RNA (siRNA) to the brain. Mice were infused via Osmotic minipumps (model 1007D; Alzet, Cupertino, Calif.) filled with phosphate-buffered saline (PBS) or free TocsiBACE or Toc-siBACE/HDL and connected with Brain Infusion Kit 3 (Alzet). A brain-infusion cannula was placed about 0.5 mm posterior to the bregma at midline for infusion into the dorsal third ventricle. Uno et al. found that as little as 3 nmol of Toc-siRNA with HDL could induce a target reduction in comparable degree by the same ICV infusion method. A similar dosage of CRISPR Cas conjugated to α-tocopherol and co-administered with HDL targeted to the brain may be contemplated for humans in the present invention, for example, about 3 nmol to about 3 μmol of CRISPR Cas targeted to the brain may be contemplated. Zou et al. ((HUMAN GENE THERAPY 22:465-475 (April 2011)) describes a method of lentiviral-mediated delivery of short-hairpin RNAs targeting PKCγ for in vivo gene silencing in the spinal cord of rats. Zou et al. administered about 10 μl of a recombinant lentivirus having a titer of 1×10⁹ transducing units (TU)/ml by an intrathecal catheter. A similar dosage of CRISPR Cas expressed in a lentiviral vector targeted to the brain may be contemplated for humans in the present invention, for example, about 10-50 ml of CRISPR Cas targeted to the brain in a lentivirus having a titer of 1×10⁹ transducing units (TU)/ml may be contemplated.

### Dosage of Vectors

[0839] In some embodiments, the vector, e.g., plasmid or viral vector is delivered to the tissue of interest by, for example, an intramuscular injection, while other times the delivery is via intravenous, transdermal, intranasal, oral, mucosal, or other delivery methods. Such delivery may be either via a single dose, or multiple doses. One skilled in the art understands that the actual dosage to be delivered herein may vary greatly depending upon a variety of factors, such as the vector choice, the target cell, organism, or tissue, the general condition of the subject to be treated, the degree of transformation/modification sought, the administration route, the administration mode, the type of transformation/modification sought, etc.

[0840] Such a dosage may further contain, for example, a carrier (water, saline, ethanol, glycerol, lactose, sucrose, calcium phosphate, gelatin, dextran, agar, pectin, peanut oil, sesame oil, etc.), a diluent, a pharmaceutically-acceptable carrier (e.g., phosphate-buffered saline), a pharmaceutically-acceptable excipient, and/or other compounds known in the art. The dosage may further contain one or more pharmaceutically acceptable salts such as, for example, a mineral acid salt such as a hydrochloride, a hydrobromide, a phosphate, a sulfate, etc.; and the salts of organic acids such as acetates, propionates, malonates, benzoates, etc. Additionally, auxiliary substances, such as wetting or emulsifying agents, pH buffering substances, gels or gelling materials, flavorings, colorants, microspheres, polymers, suspension agents, etc. may also be present herein. In addition, one or more other conventional pharmaceutical ingredients, such as preservatives, humectants, suspending agents, surfactants, antioxidants, anticaking agents, fillers, chelating agents, coating agents, chemical stabilizers, etc. may also be present, especially if the dosage form is a reconstitutable form. Suitable exemplary ingredients include microcrystalline cellulose, carboxymethylcellulose sodium, polysorbate 80, phenylethyl alcohol, chlorobutanol, potassium sorbate, sorbic acid, sulfur dioxide, propyl gallate, the parabens, ethyl vanillin, glycerin, phenol, parachlorophenol, gelatin, albumin and a combination thereof. A thorough discussion of pharmaceutically acceptable excipients is available in REMINGTON'S PHARMACEUTICAL SCIENCES (Mack Pub. Co., N.J. 1991) which is incorporated by reference herein.

[0841] In an embodiment herein the delivery is via an adenovirus, which may be at a single booster dose containing at least 1×10⁵ particles (also referred to as particle units, pu) of adenoviral vector. In an embodiment herein, the dose preferably is at least about 1×10⁶ particles (for example, about 1×10⁶-1×10¹² particles), more preferably at least about 1×10⁷ particles, more preferably at least about 1×10⁸ particles (e.g., about 1×10⁸-1×10¹¹ particles or about 1×10⁸-1×10¹² particles), and most preferably at least about 1×100 particles (e.g., about 1×10⁹-1×10¹⁰ particles or about 1×10⁹-1×10¹² particles), or even at least about 1×10¹⁰ particles (e.g., about 1×10¹⁰-1×10¹² particles) of the adenoviral vector. Alternatively, the dose comprises no more than about 1×10¹⁴ particles, preferably no more than about 1×10¹³ particles, even more preferably no more than about 1×10¹² particles, even more preferably no more than about 1×10¹¹ particles, and most preferably no more than about 1×10¹⁰ particles (e.g., no more than about 1×10⁹ articles). Thus, the dose may contain a single dose of adenoviral vector with, for example, about 1×10⁶ particle units (pu), about 2×10⁶ pu, about 4×10⁶ pu, about 1×10⁷ pu, about 2×10⁷ pu, about 4×10⁷ pu, about 1×10⁸ pu, about 2×10⁸ pu, about 4×10⁸ pu, about 1×10⁹ pu, about 2×10⁹ pu, about 4×10⁹ pu, about 1×10¹⁰ pu, about 2×10¹⁰ pu, about 4×10¹⁰ pu, about 1×10¹¹ pu, about 2×10¹¹ pu, about 4×10¹¹ pu, about 1×10¹² pu, about 2×10¹² pu, or about 4×1012 pu of adenoviral vector. See, for example, the adenoviral vectors in U.S. Pat. No. 8,454,972 B2 to Nabel, et. al., granted on Jun. 4, 2013; incorporated by reference herein, and the dosages at col 29, lines 36-58 thereof. In an embodiment herein, the adenovirus is delivered via multiple doses.

[0842] In an embodiment herein, the delivery is via an AAV. A therapeutically effective dosage for in vivo delivery of the AAV to a human is believed to be in the range of from about 20 to about 50 ml of saline solution containing from about 1×10¹⁰ to about 1×10¹⁰ functional AAV/ml solution. The dosage may be adjusted to balance the therapeutic benefit against any side effects. In an embodiment herein, the AAV dose is generally in the range of concentrations of from about 1×10⁵ to 1×10⁵⁰ genomes AAV, from about 1×10⁸ to 1×10²⁰ genomes AAV, from about 1×10¹⁰ to about 1×10¹⁶ genomes, or about 1×10¹¹ to about 1×10¹⁶ genomes AAV. A human dosage may be about 1×10¹³ genomes AAV. Such concentrations may be delivered in from about 0.001 ml to about 100 ml, about 0.05 to about 50 ml, or about 10 to about 25 ml of a carrier solution. Other effective dosages can be readily established by one of ordinary skill in the art through routine trials establishing dose response curves. See, for example, U.S. Pat. No. 8,404,658 B2 to Hajjar, et al., granted on Mar. 26, 2013, at col. 27, lines 45-60.

[0843] In an embodiment herein the delivery is via a plasmid. In such plasmid compositions, the dosage should be a sufficient amount of plasmid to elicit a response. For instance, suitable quantities of plasmid DNA in plasmid compositions can be from about 0.1 to about 2 mg, or from about 1 g to about 10 g per 70 kg individual. Plasmids of the invention will generally comprise (i) a promoter; (ii) a sequence encoding a CRISPR-Cas protein, operably linked to said promoter; (iii) a selectable marker; (iv) an origin of replication; and (v) a transcription terminator downstream of and operably linked to (ii). The plasmid can also encode the RNA components of a CRISPR complex, but one or more of these may instead be encoded on a different vector.

[0844] The doses herein are based on an average 70 kg individual. The frequency of administration is within the ambit of the medical or veterinary practitioner (e.g., physician, veterinarian), or scientist skilled in the art. It is also noted that mice used in experiments are typically about 20 g and from mice experiments one can scale up to a 70 kg individual.

[0845] The dosage used for the compositions provided herein include dosages for repeated administration or repeat dosing. In particular embodiments, the administration is repeated within a period of several weeks, months, or years. Suitable assays can be performed to obtain an optimal dosage regime. Repeated administration can allow the use of lower dosage, which can positively affect off-target modifications.

### RNA Delivery

[0846] In particular embodiments, RNA based delivery is used. In these embodiments, mRNA of the CRISPR-Cas protein, mRNA of the adenosine deaminase (which may be fused to a CRISPR-Cas protein or an adaptor), are delivered together with in vitro transcribed guide RNA. Liang et al. describes efficient genome editing using RNA based delivery (Protein Cell. 2015 May; 6(5): 363-372). In some embodiments, the mRNA(s) encoding C2c1 and/or adenosine deaminase can be chemically modified, which may lead to improved activity compared to plasmid-encoded C2c1 and/or adenosine deaminase. For example, uridines in the mRNA(s) can be partially or fully substituted with pseudouridine (P), N1-methylpseudouridine (me1T), 5-methoxyuridine(5moU). See Li et al., Nature Biomedical Engineering 1, 0066 DOI:10.1038/s41551-017-0066 (2017), which is incorporated herein by reference in its entirety.

### Exemplary of Delivery Approaches

### RNP

[0847] In particular embodiments, pre-complexed guide RNA, CRISPR-Cas protein, and adenosine deaminase (which may be fused to a CRISPR-Cas protein or an adaptor) are delivered as a ribonucleoprotein (RNP). RNPs have the advantage that they lead to rapid editing effects even more so than the RNA method because this process avoids the need for transcription. An important advantage is that both RNP delivery is transient, reducing off-target effects and toxicity issues. Efficient genome editing in different cell types has been observed by Kim et al. (2014, Genome Res. 24(6):1012-9), Paix et al. (2015, Genetics 204(1):47-54), Chu et al. (2016, BMC Biotechnol. 16:4), and Wang et al. (2013, Cell. 9; 153(4):910-8).

[0848] In particular embodiments, the ribonucleoprotein is delivered by way of a polypeptide-based shuttle agent as described in WO2016161516. WO2016161516 describes efficient transduction of polypeptide cargos using synthetic peptides comprising an endosome leakage domain (ELD) operably linked to a cell penetrating domain (CPD), to a histidine-rich domain and a CPD. Similarly these polypeptides can be used for the delivery of CRISPR-effector based RNPs in eukaryotic cells Particles

[0849] In some aspects or embodiments, a composition comprising a delivery particle formulation may be used. In some aspects or embodiments, the formulation comprises a CRISPR complex, the complex comprising a CRISPR protein and a guide which directs sequence-specific binding of the CRISPR complex to a target sequence. In some embodiments, the delivery particle comprises a lipid-based particle, optionally a lipid nanoparticle, or cationic lipid and optionally biodegradable polymer. In some embodiments, the cationic lipid comprises 1,2-dioleoyl-3-trimethylammonium-propane (DOTAP). In some embodiments, the hydrophilic polymer comprises ethylene glycol or polyethylene glycol. In some embodiments, the delivery particle further comprises a lipoprotein, preferably cholesterol. In some embodiments, the delivery particles are less than 500 nm in diameter, optionally less than 250 nm in diameter, optionally less than 100 nm in diameter, optionally about 35 nm to about 60 nm in diameter.

[0850] Several types of particle delivery systems and/or formulations are known to be useful in a diverse spectrum of biomedical applications. In general, a particle is defined as a small object that behaves as a whole unit with respect to its transport and properties. Particles are further classified according to diameter. Coarse particles cover a range between 2,500 and 10,000 nanometers. Fine particles are sized between 100 and 2,500 nanometers. Ultrafine particles, or nanoparticles, are generally between 1 and 100 nanometers in size. The basis of the 100-nm limit is the fact that novel properties that differentiate particles from the bulk material typically develop at a critical length scale of under 100 nm.

[0851] As used herein, a particle delivery system/formulation is defined as any biological delivery system/formulation which includes a particle in accordance with the present invention. A particle in accordance with the present invention is any entity having a greatest dimension (e.g. diameter) of less than 100 microns (μm). In some embodiments, inventive particles have a greatest dimension of less than 10 μm. In some embodiments, inventive particles have a greatest dimension of less than 2000 nanometers (nm). In some embodiments, inventive particles have a greatest dimension of less than 1000 nanometers (nm). In some embodiments, inventive particles have a greatest dimension of less than 900 nm, 800 nm, 700 nm, 600 nm, 500 nm, 400 nm, 300 nm, 200 nm, or 100 nm. Typically, inventive particles have a greatest dimension (e.g., diameter) of 500 nm or less. In some embodiments, inventive particles have a greatest dimension (e.g., diameter) of 250 nm or less. In some embodiments, inventive particles have a greatest dimension (e.g., diameter) of 200 nm or less. In some embodiments, inventive particles have a greatest dimension (e.g., diameter) of 150 nm or less. In some embodiments, inventive particles have a greatest dimension (e.g., diameter) of 100 nm or less. Smaller particles, e.g., having a greatest dimension of 50 nm or less are used in some embodiments of the invention. In some embodiments, inventive particles have a greatest dimension ranging between 25 nm and 200 nm.

[0852] In terms of this invention, it is preferred to have one or more components of CRISPR complex, e.g., CRISPR-Cas protein or mRNA, or adenosine deaminase (which may be fused to a CRISPR-Cas protein or an adaptor) or mRNA, or guide RNA delivered using nanoparticles or lipid envelopes. Other delivery systems or vectors are may be used in conjunction with the particle aspects of the invention.

[0853] In general, a “nanoparticle” refers to any particle having a diameter of less than 1000 nm. In certain embodiments, nanoparticles of the invention have a greatest dimension (e.g., diameter) of 500 nm or less. In other embodiments, nanoparticles of the invention have a greatest dimension ranging between 25 nm and 200 nm. In other embodiments, nanoparticles of the invention have a greatest dimension of 100 nm or less. In other embodiments, nanoparticles of the invention have a greatest dimension ranging between 35 nm and 60 nm. It will be appreciated that reference made herein to particles or nanoparticles can be interchangeable, where appropriate.

[0854] It will be understood that the size of the particle will differ depending as to whether it is measured before or after loading. Accordingly, in particular embodiments, the term “nanoparticles” may apply only to the particles pre loading.

[0855] Particles encompassed in the present invention may be provided in different forms, e.g., as solid particles (e.g., metal such as silver, gold, iron, titanium), non-metal, lipid-based solids, polymers), suspensions of particles, or combinations thereof. Metal, dielectric, and semiconductor particles may be prepared, as well as hybrid structures (e.g., core-shell particles). Particles made of semiconducting material may also be labeled quantum dots if they are small enough (typically sub 10 nm) that quantization of electronic energy levels occurs. Such nanoscale particles are used in biomedical applications as drug carriers or imaging agents and may be adapted for similar purposes in the present invention.

[0856] Semi-solid and soft particles have been manufactured, and are within the scope of the present invention. A prototype particle of semi-solid nature is the liposome. Various types of liposome particles are currently used clinically as delivery systems for anticancer drugs and vaccines. Particles with one half hydrophilic and the other half hydrophobic are termed Janus particles and are particularly effective for stabilizing emulsions. They can self-assemble at water/oil interfaces and act as solid surfactants.

[0857] Particle characterization (including e.g., characterizing morphology, dimension, etc.) is done using a variety of different techniques. Common techniques are electron microscopy (TEM, SEM), atomic force microscopy (AFM), dynamic light scattering (DLS), X-ray photoelectron spectroscopy (XPS), powder X-ray diffraction (XRD), Fourier transform infrared spectroscopy (FTIR), matrix-assisted laser desorption/ionization time-of-flight mass spectrometry (MALDI-TOF), ultraviolet-visible spectroscopy, dual polarization interferometry and nuclear magnetic resonance (NMR). Characterization (dimension measurements) may be made as to native particles (i.e., preloading) or after loading of the cargo (herein cargo refers to e.g., one or more components of CRISPR-Cas system e.g., CRISPR-Cas protein or mRNA, adenosine deaminase (which may be fused to a CRISPR-Cas protein or an adaptor) or mRNA, or guide RNA, or any combination thereof, and may include additional carriers and/or excipients) to provide particles of an optimal size for delivery for any in vitro, ex vivo and/or in vivo application of the present invention. In certain preferred embodiments, particle dimension (e.g., diameter) characterization is based on measurements using dynamic laser scattering (DLS). Mention is made of U.S. Pat. Nos. 8,709,843; 6,007,845; 5,855,913; 5,985,309; 5,543,158; and the publication by James E. Dahlman and Carmen Barnes et al. Nature Nanotechnology (2014) published online 11 May 2014, doi:10.1038/nnano.2014.84, concerning particles, methods of making and using them and measurements thereof.

[0858] Particles delivery systems within the scope of the present invention may be provided in any form, including but not limited to solid, semi-solid, emulsion, or colloidal particles. As such any of the delivery systems described herein, including but not limited to, e.g., lipid-based systems, liposomes, micelles, microvesicles, exosomes, or gene gun may be provided as particle delivery systems within the scope of the present invention.

[0859] CRISPR-Cas protein mRNA, adenosine deaminase (which may be fused to a CRISPR-Cas protein or an adaptor) or mRNA, and guide RNA may be delivered simultaneously using particles or lipid envelopes; for instance, CRISPR-Cas protein and RNA of the invention, e.g., as a complex, can be delivered via a particle as in Dahlman et al., WO2015089419 A2 and documents cited therein, such as 7C1 (see, e.g., James E. Dahlman and Carmen Barnes et al. Nature Nanotechnology (2014) published online 11 May 2014, doi:10.1038/nnano.2014.84), e.g., delivery particle comprising lipid or lipidoid and hydrophilic polymer, e.g., cationic lipid and hydrophilic polymer, for instance wherein the cationic lipid comprises 1,2-dioleoyl-3-trimethylammonium-propane (DOTAP) or 1,2-ditetradecanoyl-sn-glycero-3-phosphocholine (DMPC) and/or wherein the hydrophilic polymer comprises ethylene glycol or polyethylene glycol (PEG); and/or wherein the particle further comprises cholesterol (e.g., particle from formulation 1=DOTAP 100, DMPC 0, PEG 0, Cholesterol 0; formulation number 2=DOTAP 90, DMPC 0, PEG 10, Cholesterol 0; formulation number 3=DOTAP 90, DMPC 0, PEG 5, Cholesterol 5), wherein particles are formed using an efficient, multistep process wherein first, effector protein and RNA are mixed together, e.g., at a 1:1 molar ratio, e.g., at room temperature, e.g., for 30 minutes, e.g., in sterile, nuclease free 1×PBS; and separately, DOTAP, DMPC, PEG, and cholesterol as applicable for the formulation are dissolved in alcohol, e.g., 100% ethanol; and, the two solutions are mixed together to form particles containing the complexes).

[0860] Nucleic acid-targeting effector proteins (e.g., a Type V protein such as C2c1) mRNA and guide RNA may be delivered simultaneously using particles or lipid envelopes. Examples of suitable particles include but are not limited to those described in U.S. Pat. No. 9,301,923.

[0861] For example, Su X, Fricke J, Kavanagh D G, Irvine D J (“In vitro and in vivo mRNA delivery using lipid-enveloped pH-responsive polymer nanoparticles” Mol Pharm. 2011 Jun. 6; 8(3):774-87. doi: 10.1021/mp100390w. Epub 2011 Apr. 1) describes biodegradable core-shell structured particles with a poly(β-amino ester) (PBAE) core enveloped by a phospholipid bilayer shell. These were developed for in vivo mRNA delivery. The pH-responsive PBAE component was chosen to promote endosome disruption, while the lipid surface layer was selected to minimize toxicity of the polycation core. Such are, therefore, preferred for delivering RNA of the present invention.

[0862] In one embodiment, particles/nanoparticles based on self assembling bioadhesive polymers are contemplated, which may be applied to oral delivery of peptides, intravenous delivery of peptides and nasal delivery of peptides, all to the brain. Other embodiments, such as oral absorption and ocular delivery of hydrophobic drugs are also contemplated. The molecular envelope technology involves an engineered polymer envelope which is protected and delivered to the site of the disease (see, e.g., Mazza, M. et al. ACSNano, 2013. 7(2): 1016-1026; Siew, A., et al. Mol Pharm, 2012. 9(1):14-28; Lalatsa, A., et al. J Contr Rel, 2012. 161(2):523-36; Lalatsa, A., et al., Mol Pharm, 2012. 9(6):1665-80; Lalatsa, A., et al. Mol Pharm, 2012. 9(6):1764-74; Garrett, N. L., et al. J Biophotonics, 2012. 5(5-6):458-68; Garrett, N. L., et al. J Raman Spect, 2012. 43(5):681-688; Ahmad, S., et al. J Royal Soc Interface 2010. 7:S423-33; Uchegbu, I. F. Expert Opin Drug Deliv, 2006. 3(5):629-40; Qu, X., et al. Biomacromolecules, 2006. 7(12):3452-9 and Uchegbu, I. F., et al. Int J Pharm, 2001. 224:185-199). Doses of about 5 mg/kg are contemplated, with single or multiple doses, depending on the target tissue.

[0863] In one embodiment, particles/nanoparticles that can deliver RNA to a cancer cell to stop tumor growth developed by Dan Anderson's lab at MIT may be used/and or adapted to the AD-functionalized CRISPR-Cas system of the present invention. In particular, the Anderson lab developed fully automated, combinatorial systems for the synthesis, purification, characterization, and formulation of new biomaterials and nanoformulations. See, e.g., Alabi et al., Proc Natl Acad Sci USA. 2013 Aug. 6; 110(32):12881-6; Zhang et al., Adv Mater. 2013 Sep. 6; 25(33):4641-5; Jiang et al., Nano Lett. 2013 Mar. 13; 13(3):1059-64; Karagiannis et al., ACS Nano. 2012 Oct. 23; 6(10):8484-7; Whitehead et al., ACS Nano. 2012 Aug. 28; 6(8):6922-9 and Lee et al., Nat Nanotechnol. 2012 Jun. 3; 7(6):389-93.

[0864] US patent application 20110293703 relates to lipidoid compounds are also particularly useful in the administration of polynucleotides, which may be applied to deliver the AD-functionalized CRISPR-Cas system of the present invention. In one aspect, the aminoalcohol lipidoid compounds are combined with an agent to be delivered to a cell or a subject to form microparticles, nanoparticles, liposomes, or micelles. The agent to be delivered by the particles, liposomes, or micelles may be in the form of a gas, liquid, or solid, and the agent may be a polynucleotide, protein, peptide, or small molecule. The aminoalcohol lipidoid compounds may be combined with other aminoalcohol lipidoid compounds, polymers (synthetic or natural), surfactants, cholesterol, carbohydrates, proteins, lipids, etc. to form the particles. These particles may then optionally be combined with a pharmaceutical excipient to form a pharmaceutical composition.

[0865] US Patent Publication No. 20110293703 also provides methods of preparing the aminoalcohol lipidoid compounds. One or more equivalents of an amine are allowed to react with one or more equivalents of an epoxide-terminated compound under suitable conditions to form an aminoalcohol lipidoid compound of the present invention. In certain embodiments, all the amino groups of the amine are fully reacted with the epoxide-terminated compound to form tertiary amines. In other embodiments, all the amino groups of the amine are not fully reacted with the epoxide-terminated compound to form tertiary amines thereby resulting in primary or secondary amines in the aminoalcohol lipidoid compound. These primary or secondary amines are left as is or may be reacted with another electrophile such as a different epoxide-terminated compound. As will be appreciated by one skilled in the art, reacting an amine with less than excess of epoxide-terminated compound will result in a plurality of different aminoalcohol lipidoid compounds with various numbers of tails. Certain amines may be fully functionalized with two epoxide-derived compound tails while other molecules will not be completely functionalized with epoxide-derived compound tails. For example, a diamine or polyamine may include one, two, three, or four epoxide-derived compound tails off the various amino moieties of the molecule resulting in primary, secondary, and tertiary amines. In certain embodiments, all the amino groups are not fully functionalized. In certain embodiments, two of the same types of epoxide-terminated compounds are used. In other embodiments, two or more different epoxide-terminated compounds are used. The synthesis of the aminoalcohol lipidoid compounds is performed with or without solvent, and the synthesis may be performed at higher temperatures ranging from 30−100° C., preferably at approximately 50-90° C. The prepared aminoalcohol lipidoid compounds may be optionally purified. For example, the mixture of aminoalcohol lipidoid compounds may be purified to yield an aminoalcohol lipidoid compound with a particular number of epoxide-derived compound tails. Or the mixture may be purified to yield a particular stereo- or regioisomer. The aminoalcohol lipidoid compounds may also be alkylated using an alkyl halide (e.g., methyl iodide) or other alkylating agent, and/or they may be acylated.

[0866] US Patent Publication No. 20110293703 also provides libraries of aminoalcohol lipidoid compounds prepared by the inventive methods. These aminoalcohol lipidoid compounds may be prepared and/or screened using high-throughput techniques involving liquid handlers, robots, microtiter plates, computers, etc. In certain embodiments, the aminoalcohol lipidoid compounds are screened for their ability to transfect polynucleotides or other agents (e.g., proteins, peptides, small molecules) into the cell.

[0867] US Patent Publication No. 20130302401 relates to a class of poly(beta-amino alcohols) (PBAAs) has been prepared using combinatorial polymerization. The inventive PBAAs may be used in biotechnology and biomedical applications as coatings (such as coatings of films or multilayer films for medical devices or implants), additives, materials, excipients, non-biofouling agents, micropatterning agents, and cellular encapsulation agents. When used as surface coatings, these PBAAs elicited different levels of inflammation, both in vitro and in vivo, depending on their chemical structures. The large chemical diversity of this class of materials allowed us to identify polymer coatings that inhibit macrophage activation in vitro. Furthermore, these coatings reduce the recruitment of inflammatory cells, and reduce fibrosis, following the subcutaneous implantation of carboxylated polystyrene microparticles. These polymers may be used to form polyelectrolyte complex capsules for cell encapsulation. The invention may also have many other biological applications such as antimicrobial coatings, DNA or siRNA delivery, and stem cell tissue engineering. The teachings of US Patent Publication No. 20130302401 may be applied to the AD-functionalized CRISPR-Cas system of the present invention.

[0868] Preassembled recombinant CRISPR-Cas complexes comprising C2c1, adenosine deaminase (which may be fused to C2c1 or an adaptor protein), and guide RNA may be transfected, for example by electroporation, resulting in high mutation rates and absence of detectable off-target mutations. Hur, J. K. et al, Targeted mutagenesis in mice by electroporation of C2c1 ribonucleoproteins, Nat Biotechnol. 2016 Jun. 6. doi: 10.1038/nbt.3596.

[0869] In terms of local delivery to the brain, this can be achieved in various ways. For instance, material can be delivered intrastriatally e.g. by injection. Injection can be performed stereotactically via a craniotomy.

[0870] In some embodiments, sugar-based particles may be used, for example GaNAc, as described herein and with reference to WO2014118272 (incorporated herein by reference) and Nair, J K et al., 2014, Journal of the American Chemical Society 136 (49), 16958-16961) and the teaching herein, especially in respect of delivery applies to all particles unless otherwise apparent. This may be considered to be a sugar-based particle and further details on other particle delivery systems and/or formulations are provided herein. GalNAc can therefore be considered to be a particle in the sense of the other particles described herein, such that general uses and other considerations, for instance delivery of said particles, apply to GaNAc particles as well. A solution-phase conjugation strategy may for example be used to attach triantennary GalNAc clusters (mol. wt. ˜2000) activated as PFP (pentafluorophenyl) esters onto 5′-hexylamino modified oligonucleotides (5′-HA ASOs, mol. wt. ˜8000 Da; Ostergaard et al., Bioconjugate Chem., 2015, 26 (8), pp 1451-1455). Similarly, poly(acrylate) polymers have been described for in vivo nucleic acid delivery (see WO2013158141 incorporated herein by reference). In further alternative embodiments, pre-mixing CRISPR nanoparticles (or protein complexes) with naturally occurring serum proteins may be used in order to improve delivery (Akinc A et al, 2010, Molecular Therapy vol. 18 no. 7, 1357-1364).

### Nanoclews

[0871] Further, the AD-functionalized CRISPR system may be delivered using nanoclews, for example as described in Sun W et al, Cocoon-like self-degradable DNA nanoclew for anticancer drug delivery, J Am Chem Soc. 2014 Oct. 22; 136(42):14722-5. doi: 10.1021/ja5088024. Epub 2014 Oct. 13; or in Sun W et al, Self-Assembled DNA Nanoclews for the Efficient Delivery of CRISPR-Cas9 for Genome Editing, Angew Chem Int Ed Engl. 2015 Oct. 5; 54(41):12029-33. doi: 10.1002/anie.201506030. Epub 2015 Aug. 27.

### Livid Particles

[0872] In some embodiments, delivery is by encapsulation of the C2c1 protein or mRNA form in a lipid particle such as an LNP. In some embodiments, therefore, lipid particles (LNPs) are contemplated. An antitransthyretin small interfering RNA has been encapsulated in lipid nanoparticles and delivered to humans (see, e.g., Coelho et al., N Engl J Med 2013; 369:819-29), and such a system may be adapted and applied to the CRISPR Cas system of the present invention. Doses of about 0.01 to about 1 mg per kg of body weight administered intravenously are contemplated. Medications to reduce the risk of infusion-related reactions are contemplated, such as dexamethasone, acetampinophen, diphenhydramine or cetirizine, and ranitidine are contemplated. Multiple doses of about 0.3 mg per kilogram every 4 weeks for five doses are also contemplated.

[0873] LNPs have been shown to be highly effective in delivering siRNAs to the liver (see, e.g., Tabernero et al., Cancer Discovery, April 2013, Vol. 3, No. 4, pages 363-470) and are therefore contemplated for delivering RNA encoding CRISPR Cas to the liver. A dosage of about four doses of 6 mg/kg of the LNP every two weeks may be contemplated. Tabernero et al. demonstrated that tumor regression was observed after the first 2 cycles of LNPs dosed at 0.7 mg/kg, and by the end of 6 cycles the patient had achieved a partial response with complete regression of the lymph node metastasis and substantial shrinkage of the liver tumors. A complete response was obtained after 40 doses in this patient, who has remained in remission and completed treatment after receiving doses over 26 months. Two patients with RCC and extrahepatic sites of disease including kidney, lung, and lymph nodes that were progressing following prior therapy with VEGF pathway inhibitors had stable disease at all sites for approximately 8 to 12 months, and a patient with PNET and liver metastases continued on the extension study for 18 months (36 doses) with stable disease.

[0874] However, the charge of the LNP must be taken into consideration. As cationic lipids combined with negatively charged lipids to induce nonbilayer structures that facilitate intracellular delivery. Because charged LNPs are rapidly cleared from circulation following intravenous injection, ionizable cationic lipids with pKa values below 7 were developed (see, e.g., Rosin et al, Molecular Therapy, vol. 19, no. 12, pages 1286-2200, December 2011). Negatively charged polymers such as RNA may be loaded into LNPs at low pH values (e.g., pH 4) where the ionizable lipids display a positive charge. However, at physiological pH values, the LNPs exhibit a low surface charge compatible with longer circulation times. Four species of ionizable cationic lipids have been focused upon, namely 1,2-dilineoyl-3-dimethylammonium-propane (DLinDAP), 1,2-dilinoleyloxy-3-N,N-dimethylaminopropane (DLinDMA), 1,2-dilinoleyloxy-keto-N,N-dimethyl-3-aminopropane (DLinKDMA), and 1,2-dilinoleyl-4-(2-dimethylaminoethyl)-[1,3]-dioxolane (DLinKC2-DMA). It has been shown that LNP siRNA systems containing these lipids exhibit remarkably different gene silencing properties in hepatocytes in vivo, with potencies varying according to the series DLinKC2-DMA>DLinKDMA>DLinDMA>>DLinDAP employing a Factor VII gene silencing model (see, e.g., Rosin et al, Molecular Therapy, vol. 19, no. 12, pages 1286-2200, December 2011). A dosage of 1 g/ml of LNP or CRISPR-Cas RNA in or associated with the LNP may be contemplated, especially for a formulation containing DLinKC2-DMA.

[0875] Preparation of LNPs and CRISPR Cas encapsulation may be used/and or adapted from Rosin et al, Molecular Therapy, vol. 19, no. 12, pages 1286-2200, December 2011). The cationic lipids 1,2-dilineoyl-3-dimethylammonium-propane (DLinDAP), 1,2-dilinoleyloxy-3-N,N-dimethylaminopropane (DLinDMA), 1,2-dilinoleyloxyketo-N,N-dimethyl-3-aminopropane (DLinK-DMA), 1,2-dilinoleyl-4-(2-dimethylaminoethyl)-[1,3]-dioxolane (DLinKC2-DMA), (3-o-[2″-(methoxypolyethyleneglycol 2000) succinoyl]-1,2-dimyristoyl-sn-glycol (PEG-S-DMG), and R-3-[(o-methoxy-poly(ethylene glycol)2000) carbamoyl]-1,2-dimyristyloxlpropyl-3-amine (PEG-C-DOMG) may be provided by Tekmira Pharmaceuticals (Vancouver, Canada) or synthesized. Cholesterol may be purchased from Sigma (St Louis, Mo.). The specific CRISPR Cas RNA may be encapsulated in LNPs containing DLinDAP, DLinDMA, DLinK-DMA, and DLinKC2-DMA (cationic lipid:DSPC:CHOL: PEGS-DMG or PEG-C-DOMG at 40:10:40:10 molar ratios). When required, 0.2% SP-DiOC18 (Invitrogen, Burlington, Canada) may be incorporated to assess cellular uptake, intracellular delivery, and biodistribution. Encapsulation may be performed by dissolving lipid mixtures comprised of cationic lipid:DSPC:cholesterol:PEG-c-DOMG (40:10:40:10 molar ratio) in ethanol to a final lipid concentration of 10 mmol/l. This ethanol solution of lipid may be added drop-wise to 50 mmol/l citrate, pH 4.0 to form multilamellar vesicles to produce a final concentration of 30% ethanol vol/vol. Large unilamellar vesicles may be formed following extrusion of multilamellar vesicles through two stacked 80 nm Nuclepore polycarbonate filters using the Extruder (Northern Lipids, Vancouver, Canada). Encapsulation may be achieved by adding RNA dissolved at 2 mg/ml in 50 mmol/l citrate, pH 4.0 containing 30% ethanol vol/vol drop-wise to extruded preformed large unilamellar vesicles and incubation at 31° C. for 30 minutes with constant mixing to a final RNA/lipid weight ratio of 0.06/1 wt/wt. Removal of ethanol and neutralization of formulation buffer were performed by dialysis against phosphate-buffered saline (PBS), pH 7.4 for 16 hours using Spectra/Por 2 regenerated cellulose dialysis membranes. Nanoparticle size distribution may be determined by dynamic light scattering using a NICOMP 370 particle sizer, the vesicle/intensity modes, and Gaussian fitting (Nicomp Particle Sizing, Santa Barbara, Calif.). The particle size for all three LNP systems may be −70 nm in diameter. RNA encapsulation efficiency may be determined by removal of free RNA using VivaPureD MiniH columns (Sartorius Stedim Biotech) from samples collected before and after dialysis. The encapsulated RNA may be extracted from the eluted particles and quantified at 260 nm. RNA to lipid ratio was determined by measurement of cholesterol content in vesicles using the Cholesterol E enzymatic assay from Wako Chemicals USA (Richmond, Va.). In conjunction with the herein discussion of LNPs and PEG lipids, PEGylated liposomes or LNPs are likewise suitable for delivery of a CRISPR-Cas system or components thereof.

[0876] A lipid premix solution (20.4 mg/ml total lipid concentration) may be prepared in ethanol containing DLinKC2-DMA, DSPC, and cholesterol at 50:10:38.5 molar ratios. Sodium acetate may be added to the lipid premix at a molar ratio of 0.75:1 (sodium acetate:DLinKC2-DMA). The lipids may be subsequently hydrated by combining the mixture with 1.85 volumes of citrate buffer (10 mmol/1, pH 3.0) with vigorous stirring, resulting in spontaneous liposome formation in aqueous buffer containing 35% ethanol. The liposome solution may be incubated at 37° C. to allow for time-dependent increase in particle size. Aliquots may be removed at various times during incubation to investigate changes in liposome size by dynamic light scattering (Zetasizer Nano ZS, Malvern Instruments, Worcestershire, UK). Once the desired particle size is achieved, an aqueous PEG lipid solution (stock=10 mg/ml PEG-DMG in 35% (vol/vol) ethanol) may be added to the liposome mixture to yield a final PEG molar concentration of 3.5% of total lipid. Upon addition of PEG-lipids, the liposomes should their size, effectively quenching further growth. RNA may then be added to the empty liposomes at an RNA to total lipid ratio of approximately 1:10 (wt:wt), followed by incubation for 30 minutes at 37° C. to form loaded LNPs. The mixture may be subsequently dialyzed overnight in PBS and filtered with a 0.45-μm syringe filter.

[0877] Spherical Nucleic Acid (SNA™) constructs and other particles (particularly gold nanoparticles) are also contemplated as a means to delivery CRISPR-Cas system to intended targets. Significant data show that AuraSense Therapeutics' Spherical Nucleic Acid (SNA™) constructs, based upon nucleic acid-functionalized gold nanoparticles, are useful.

[0878] Literature that may be employed in conjunction with herein teachings include: Cutler et al., J. Am. Chem. Soc. 2011 133:9254-9257, Hao et al., Small. 2011 7:3158-3162, Zhang et al., ACS Nano. 2011 5:6962-6970, Cutler et al., J. Am. Chem. Soc. 2012 134:1376-1391, Young et al., Nano Lett. 2012 12:3867-71, Zheng et al., Proc. Natl. Acad. Sci. USA. 2012 109:11975-80, Mirkin, Nanomedicine 2012 7:635-638 Zhang et al., J. Am. Chem. Soc. 2012 134:16488-1691, Weintraub, Nature 2013 495:S14-S16, Choi et al., Proc. Natl. Acad. Sci. USA. 2013 110(19):7625-7630, Jensen et al., Sci. Transl. Med. 5, 209ra152 (2013) and Mirkin, et al., Small, 10:186-192.

[0879] Self-assembling particles with RNA may be constructed with polyethyleneimine (PEI) that is PEGylated with an Arg-Gly-Asp (RGD) peptide ligand attached at the distal end of the polyethylene glycol (PEG). This system has been used, for example, as a means to target tumor neovasculature expressing integrins and deliver siRNA inhibiting vascular endothelial growth factor receptor-2 (VEGF R2) expression and thereby achieve tumor angiogenesis (see, e.g., Schiffelers et al., Nucleic Acids Research, 2004, Vol. 32, No. 19). Nanoplexes may be prepared by mixing equal volumes of aqueous solutions of cationic polymer and nucleic acid to give a net molar excess of ionizable nitrogen (polymer) to phosphate (nucleic acid) over the range of 2 to 6. The electrostatic interactions between cationic polymers and nucleic acid resulted in the formation of polyplexes with average particle size distribution of about 100 nm, hence referred to here as nanoplexes. A dosage of about 100 to 200 mg of CRISPR Cas is envisioned for delivery in the self-assembling particles of Schiffelers et al.

[0880] The nanoplexes of Bartlett et al. (PNAS, Sep. 25, 2007, vol. 104, no. 39) may also be applied to the present invention. The nanoplexes of Bartlett et al. are prepared by mixing equal volumes of aqueous solutions of cationic polymer and nucleic acid to give a net molar excess of ionizable nitrogen (polymer) to phosphate (nucleic acid) over the range of 2 to 6. The electrostatic interactions between cationic polymers and nucleic acid resulted in the formation of polyplexes with average particle size distribution of about 100 nm, hence referred to here as nanoplexes. The DOTA-siRNA of Bartlett et al. was synthesized as follows: 1,4,7,10-tetraazacyclododecane-1,4,7,10-tetraacetic acid mono(N-hydroxysuccinimide ester) (DOTA-NHSester) was ordered from Macrocyclics (Dallas, Tex.). The amine modified RNA sense strand with a 100-fold molar excess of DOTA-NHS-ester in carbonate buffer (pH 9) was added to a microcentrifuge tube. The contents were reacted by stirring for 4 h at room temperature. The DOTA-RNAsense conjugate was ethanol-precipitated, resuspended in water, and annealed to the unmodified antisense strand to yield DOTA-siRNA. All liquids were pretreated with Chelex-100 (Bio-Rad, Hercules, Calif.) to remove trace metal contaminants. Tf-targeted and nontargeted siRNA particles may be formed by using cyclodextrin-containing polycations. Typically, particles were formed in water at a charge ratio of 3 (+/−) and an siRNA concentration of 0.5 g/liter. One percent of the adamantane-PEG molecules on the surface of the targeted particles were modified with Tf (adamantane-PEG-Tf). The particles were suspended in a 5% (wt/vol) glucose carrier solution for injection.

[0881] Davis et al. (Nature, Vol 464, 15 Apr. 2010) conducts a RNA clinical trial that uses a targeted nanoparticle-delivery system (clinical trial registration number NCT00689065). Patients with solid cancers refractory to standard-of-care therapies are administered doses of targeted nanoparticles on days 1, 3, 8 and 10 of a 21-day cycle by a 30-min intravenous infusion. The nanoparticles consist of a synthetic delivery system containing: (1) a linear, cyclodextrin-based polymer (CDP), (2) a human transferrin protein (TF) targeting ligand displayed on the exterior of the nanoparticle to engage TF receptors (TFR) on the surface of the cancer cells, (3) a hydrophilic polymer (polyethylene glycol (PEG) used to promote nanoparticle stability in biological fluids), and (4) siRNA designed to reduce the expression of the RRM2 (sequence used in the clinic was previously denoted siR2B+5). The TFR has long been known to be upregulated in malignant cells, and RRM2 is an established anti-cancer target. These particles (clinical version denoted as CALAA-01) have been shown to be well tolerated in multi-dosing studies in non-human primates. Although a single patient with chronic myeloid leukemia has been administered siRNA by liposomal delivery, Davis et al.'s clinical trial is the initial human trial to systemically deliver siRNA with a targeted delivery system and to treat patients with solid cancer. To ascertain whether the targeted delivery system can provide effective delivery of functional siRNA to human tumors, Davis et al. investigated biopsies from three patients from three different dosing cohorts; patients A, B and C, all of whom had metastatic melanoma and received CALAA-01 doses of 18, 24 and 30 mg m⁻² siRNA, respectively. Similar doses may also be contemplated for the CRISPR Cas system of the present invention. The delivery of the invention may be achieved with particles containing a linear, cyclodextrin-based polymer (CDP), a human transferrin protein (TF) targeting ligand displayed on the exterior of the particle to engage TF receptors (TFR) on the surface of the cancer cells and/or a hydrophilic polymer (for example, polyethylene glycol (PEG) used to promote particle stability in biological fluids).

[0882] U.S. Pat. No. 8,709,843, incorporated herein by reference, provides a drug delivery system for targeted delivery of therapeutic agent-containing particles to tissues, cells, and intracellular compartments. The invention provides targeted particles comprising polymer conjugated to a surfactant, hydrophilic polymer or lipid. U.S. Pat. No. 6,007,845, incorporated herein by reference, provides particles which have a core of a multiblock copolymer formed by covalently linking a multifunctional compound with one or more hydrophobic polymers and one or more hydrophilic polymers, and contain a biologically active material. U.S. Pat. No. 5,855,913, incorporated herein by reference, provides a particulate composition having aerodynamically light particles having a tap density of less than 0.4 g/cm³ with a mean diameter of between 5 μm and 30 μm, incorporating a surfactant on the surface thereof for drug delivery to the pulmonary system. U.S. Pat. No. 5,985,309, incorporated herein by reference, provides particles incorporating a surfactant and/or a hydrophilic or hydrophobic complex of a positively or negatively charged therapeutic or diagnostic agent and a charged molecule of opposite charge for delivery to the pulmonary system. U.S. Pat. No. 5,543,158, incorporated herein by reference, provides biodegradable injectable particles having a biodegradable solid core containing a biologically active material and poly(alkylene glycol) moieties on the surface. WO2012135025 (also published as US20120251560), incorporated herein by reference, describes conjugated polyethyleneimine (PEI) polymers and conjugated aza-macrocycles (collectively referred to as “conjugated lipomer” or “lipomers”). In certain embodiments, it can be envisioned that such conjugated lipomers can be used in the context of the CRISPR-Cas system to achieve in vitro, ex vivo and in vivo genomic perturbations to modify gene expression, including modulation of protein expression.

[0883] In one embodiment, the particle may be epoxide-modified lipid-polymer, advantageously 7C1 (see, e.g., James E. Dahlman and Carmen Barnes et al. Nature Nanotechnology (2014) published online 11 May 2014, doi:10.1038/nnano.2014.84). C71 was synthesized by reacting C15 epoxide-terminated lipids with PEI600 at a 14:1 molar ratio, and was formulated with C14PEG2000 to produce particles (diameter between 35 and 60 nm) that were stable in PBS solution for at least 40 days.

[0884] An epoxide-modified lipid-polymer may be utilized to deliver the CRISPR-Cas system of the present invention to pulmonary, cardiovascular or renal cells, however, one of skill in the art may adapt the system to deliver to other target organs. Dosage ranging from about 0.05 to about 0.6 mg/kg are envisioned. Dosages over several days or weeks are also envisioned, with a total dosage of about 2 mg/kg.

[0885] In some embodiments, the LNP for delivering the RNA molecules is prepared by methods known in the art, such as those described in, for example, WO 2005/105152 (PCT/EP2005/004920), WO 2006/069782 (PCT/EP2005/014074), WO 2007/121947 (PCT/EP2007/003496), and WO 2015/082080 (PCT/EP2014/003274), which are herein incorporated by reference. LNPs aimed specifically at the enhanced and improved delivery of siRNA into mammalian cells are described in, for example, Aleku et al., Cancer Res., 68(23): 9788-98 (Dec. 1, 2008), Strumberg et al., Int. J. Cin. Pharmacol. Ther., 50(1): 76-8 (January 2012), Schultheis et al., J. Cin. Oncol., 32(36): 4141-48 (Dec. 20, 2014), and Fehring et al., Mol. Ther., 22(4): 811-20 (Apr. 22, 2014), which are herein incorporated by reference and may be applied to the present technology.

[0886] In some embodiments, the LNP includes any LNP disclosed in WO 2005/105152 (PCT/EP2005/004920), WO 2006/069782 (PCT/EP2005/014074), WO 2007/121947 (PCT/EP2007/003496), and WO 2015/082080 (PCT/EP2014/003274).

[0887] In some embodiments, the LNP includes at least one lipid having Formula I:

[chemical structure]

wherein R1 and R2 are each and independently selected from the group comprising alkyl, n is any integer between 1 and 4, and R3 is an acyl selected from the group comprising lysyl, ornithyl, 2,4-diaminobutyryl, histidyl and an acyl moiety according to Formula II:

[chemical structure]

wherein m is any integer from 1 to 3 and Y⁻ is a pharmaceutically acceptable anion. In some embodiments, a lipid according to Formula I includes at least two asymmetric C atoms. In some embodiments, enantiomers of Formula I include, but are not limited to, R-R; S-S; R—S and S-R enantiomer.

[0888] In some embodiments, R1 is lauryl and R2 is myristyl. In another embodiment, R1 is palmityl and R2 is oleyl. In some embodiments, m is 1 or 2. In some embodiments, Y— is selected from halogenids, acetate or trifluoroacetate.

[0889] In some embodiments, the LNP comprises one or more lipids select from:

[0890] -arginyl-2,3-diamino propionic acid-N-palmityl-N-oleyl-amide trihydrochloride (Formula III):

[chemical structure]

[0891] -arginyl-2,3-diamino propionic acid-N-lauryl-N-myristyl-amide trihydrochloride (Formula IV):

[chemical structure]

and

[0892] -arginyl-lysine-N-lauryl-N-myristyl-amide trihydrochloride (Formula V):

[chemical structure]

[0893] In some embodiments, the LNP also includes a constituent. By way of example, but not by way of limitation, in some embodiments, the constituent is selected from peptides, proteins, oligonucleotides, polynucleotides, nucleic acids, or a combination thereof. In some embodiments, the constituent is an antibody, e.g., a monoclonal antibody. In some embodiments, the constituent is a nucleic acid selected from, e.g., ribozymes, aptamers, spiegelmers, DNA, RNA, PNA, LNA, or a combination thereof. In some embodiments, the nucleic acid is guide RNA and/or mRNA.

[0894] In some embodiments, the constituent of the LNP comprises an mRNA encoding a CRIPSR-Cas protein. In some embodiments, the constituent of the LNP comprises an mRNA encoding a Type-II or Type-V CRIPSR-Cas protein. In some embodiments, the constituent of the LNP comprises an mRNA encoding an adenosine deaminase (which may be fused to a CRISPR-Cas protein or an adaptor protein).

[0895] In some embodiments, the constituent of the LNP further comprises one or more guide RNA. In some embodiments, the LNP is configured to deliver the aforementioned mRNA and guide RNA to vascular endothelium. In some embodiments, the LNP is configured to deliver the aforementioned mRNA and guide RNA to pulmonary endothelium. In some embodiments, the LNP is configured to deliver the aforementioned mRNA and guide RNA to liver. In some embodiments, the LNP is configured to deliver the aforementioned mRNA and guide RNA to lung. In some embodiments, the LNP is configured to deliver the aforementioned mRNA and guide RNA to hearts. In some embodiments, the LNP is configured to deliver the aforementioned mRNA and guide RNA to spleen. In some embodiments, the LNP is configured to deliver the aforementioned mRNA and guide RNA to kidney. In some embodiments, the LNP is configured to deliver the aforementioned mRNA and guide RNA to pancrea. In some embodiments, the LNP is configured to deliver the aforementioned mRNA and guide RNA to brain. In some embodiments, the LNP is configured to deliver the aforementioned mRNA and guide RNA to macrophages.

[0896] In some embodiments, the LNP also includes at least one helper lipid. In some embodiments, the helper lipid is selected from phospholipids and steroids. In some embodiments, the phospholipids are di- and/or monoester of the phosphoric acid. In some embodiments, the phospholipids are phosphoglycerides and/or sphingolipids. In some embodiments, the steroids are naturally occurring and/or synthetic compounds based on the partially hydrogenated cyclopenta[a]phenanthrene. In some embodiments, the steroids contain 21 to 30 C atoms. In some embodiments, the steroid is cholesterol. In some embodiments, the helper lipid is selected from 1,2-diphytanoyl-sn-glycero-3-phosphoethanolamine (DPhyPE), ceramide, and 1,2-dioleylsn-glycero-3-phosphoethanolamine (DOPE).

[0897] In some embodiments, the at least one helper lipid comprises a moiety selected from the group comprising a PEG moiety, a HEG moiety, a polyhydroxyethyl starch (polyHES) moiety and a polypropylene moiety. In some embodiments, the moiety has a molecule weight between about 500 to 10,000 Da or between about 2,000 to 5,000 Da. In some embodiments, the PEG moiety is selected from 1,2-distearoyl-sn-glycero-3 phosphoethanolamine, 1,2-dialkyl-sn-glycero-3-phosphoethanolamine, and Ceramide-PEG. In some embodiments, the PEG moiety has a molecular weight between about 500 to 10,000 Da or between about 2,000 to 5,000 Da. In some embodiments, the PEG moiety has a molecular weight of 2,000 Da.

[0898] In some embodiments, the helper lipid is between about 20 mol % to 80 mol % of the total lipid content of the composition. In some embodiments, the helper lipid component is between about 35 mol % to 65 mol % of the total lipid content of the LNP. In some embodiments, the LNP includes lipids at 50 mol % and the helper lipid at 50 mol % of the total lipid content of the LNP.

[0899] In some embodiments, the LNP includes any of -3-arginyl-2,3-diaminopropionic acid-N-palmityl-N-oleyl-amide trihydrochloride, -arginyl-2,3-diaminopropionic acid-N-lauryl-N-myristyl-amide trihydrochloride or -arginyl-lysine-N-lauryl-N-myristyl-amide trihydrochloride in combination with DPhyPE, wherein the content of DPhyPE is about 80 mol %, 65 mol %, 50 mol % and 35 mol % of the overall lipid content of the LNP. In some embodiments, the LNP includes -arginyl-2,3-diamino propionic acid-N-pahnityl-N-oleyl-amide trihydrochloride (lipid) and 1,2-diphytanoyl-sn-glycero-3-phosphoethanolamine (helper lipid). In some embodiments, the LNP includes -arginyl-2,3-diamino propionic acid-N-palmityl-N-oleyl-amide trihydrochloride (lipid), 1,2-diphytanoyl-sn-glycero-3-phosphoethanolamine (first helper lipid), and 1,2-disteroyl-sn-glycero-3-phosphoethanolamine-PEG2000 (second helper lipid).

[0900] In some embodiments, the second helper lipid is between about 0.05 mol % to 4.9 mol % or between about 1 mol % to 3 mol % of the total lipid content. In some embodiments, the LNP includes lipids at between about 45 mol % to 50 mol % of the total lipid content, a first helper lipid between about 45 mol % to 50 mol % of the total lipid content, under the proviso that there is a PEGylated second helper lipid between about 0.1 mol % to 5 mol %, between about 1 mol % to 4 mol %, or at about 2 mol % of the total lipid content, wherein the sum of the content of the lipids, the first helper lipid, and of the second helper lipid is 100 mol % of the total lipid content and wherein the sum of the first helper lipid and the second helper lipid is 50 mol % of the total lipid content. In some embodiments, the LNP comprises: (a) 50 mol % of

[0901] -arginyl-2,3-diamino propionic acid-N-palmityl-N-oleyl-amide trihydrochloride, 48 mol % of 1,2-diphytanoyl-sn-glycero-3-phosphoethanolamine; and 2 mol % 1,2-distearoyl-sn-glycero-3-phosphoethanolamine-PEG2000; or (b) 50 mol % of -arginyl-2,3-diamino propionic acid-N-palmityl-N-oleyl-amide trihydrocloride, 49 mol % 1,2-diphytanoyl-sn-glycero-3-phosphoethanolamine; and 1 mol % N(Carbonyl-methoxypolyethylenglycol-2000)-1,2-distearoyl-sn-glycero3-phosphoethanolamine, or a sodium salt thereof.

[0902] In some embodiments, the LNP contains a nucleic acid, wherein the charge ratio of nucleic acid backbone phosphates to cationic lipid nitrogen atoms is about 1: 1.5-7 or about 1:4.

[0903] In some embodiments, the LNP also includes a shielding compound, which is removable from the lipid composition under in vivo conditions. In some embodiments, the shielding compound is a biologically inert compound. In some embodiments, the shielding compound does not carry any charge on its surface or on the molecule as such. In some embodiments, the shielding compounds are polyethylenglycoles (PEGs), hydroxyethylglucose (HEG) based polymers, polyhydroxyethyl starch (polyHES) and polypropylene. In some embodiments, the PEG, HEG, polyHES, and a polypropylene weight between about 500 to 10,000 Da or between about 2000 to 5000 Da. In some embodiments, the shielding compound is PEG2000 or PEG5000.

[0904] In some embodiments, the LNP includes at least one lipid, a first helper lipid, and a shielding compound that is removable from the lipid composition under in vivo conditions. In some embodiments, the LNP also includes a second helper lipid. In some embodiments, the first helper lipid is ceramide. In some embodiments, the second helper lipid is ceramide. In some embodiments, the ceramide comprises at least one short carbon chain substituent of from 6 to 10 carbon atoms. In some embodiments, the ceramide comprises 8 carbon atoms. In some embodiments, the shielding compound is attached to a ceramide. In some embodiments, the shielding compound is attached to a ceramide. In some embodiments, the shielding compound is covalently attached to the ceramide. In some embodiments, the shielding compound is attached to a nucleic acid in the LNP. In some embodiments, the shielding compound is covalently attached to the nucleic acid. In some embodiments, the shielding compound is attached to the nucleic acid by a linker. In some embodiments, the linker is cleaved under physiological conditions. In some embodiments, the linker is selected from ssRNA, ssDNA, dsRNA, dsDNA, peptide, S-S-linkers and pH sensitive linkers. In some embodiments, the linker moiety is attached to the 3′ end of the sense strand of the nucleic acid. In some embodiments, the shielding compound comprises a pH-sensitive linker or a pH-sensitive moiety. In some embodiments, the pH-sensitive linker or pH-sensitive moiety is an anionic linker or an anionic moiety. In some embodiments, the anionic linker or anionic moiety is less anionic or neutral in an acidic environment. In some embodiments, the pH-sensitive linker or the pH-sensitive moiety is selected from the oligo (glutamic acid), oligophenolate(s) and diethylene triamine penta acetic acid.

[0905] In any of the LNP embodiments in the previous paragraph, the LNP can have an osmolality between about 50 to 600 mosmole/kg, between about 250 to 350 mosmole/kg, or between about 280 to 320 mosmole/kg, and/or wherein the LNP formed by the lipid and/or one or two helper lipids and the shielding compound have a particle size between about 20 to 200 nm, between about 30 to 100 nm, or between about 40 to 80 nm.

[0906] In some embodiments, the shielding compound provides for a longer circulation time in vivo and allows for a better biodistribution of the nucleic acid containing LNP. In some embodiments, the shielding compound prevents immediate interaction of the LNP with serum compounds or compounds of other bodily fluids or cytoplasma membranes, e.g., cytoplasma membranes of the endothelial lining of the vasculature, into which the LNP is administered. Additionally or alternatively, in some embodiments, the shielding compounds also prevent elements of the immune system from immediately interacting with the LNP. Additionally or alternatively, in some embodiments, the shielding compound acts as an anti-opsonizing compound. Without wishing to be bound by any mechanism or theory, in some embodiments, the shielding compound forms a cover or coat that reduces the surface area of the LNP available for interaction with its environment. Additionally or alternatively, in some embodiments, the shielding compound shields the overall charge of the LNP.

[0907] In another embodiment, the LNP includes at least one cationic lipid having Formula VI:

[chemical structure]

wherein n is 1, 2, 3, or 4, wherein m is 1, 2, or 3, wherein Y⁻ is anion, wherein each of R¹ and R² is individually and independently selected from the group consisting of linear C12-C18 alkyl and linear C12-C18 alkenyl, a sterol compound, wherein the sterol compound is selected from the group consisting of cholesterol and stigmasterol, and a PEGylated lipid, wherein the PEGylated lipid comprises a PEG moiety, wherein the PEGylated lipid is selected from the group consisting of:
a PEGylated phosphoethanolamine of Formula VII:

[chemical structure]

wherein R³ and R⁴ are individually and independently linear C13-C17 alkyl, and p is any integer between 15 to 130;
a PEGylated ceramide of Formula VIII:

[chemical structure]

wherein R⁵ is linear C7-C15 alkyl, and q is any number between 15 to 130; and a PEGylated diacylglycerol of Formula IX:

[chemical structure]

wherein each of R⁶ and R⁷ is individually and independently linear C11-C17 alkyl, and r is any integer from 15 to 130.

[0908] In some embodiments, R1 and R2 are different from each other. In some embodiments, R1 is palmityl and R2 is oleyl. In some embodiments, R1 is lauryl and R2 is myristyl. In some embodiments, R1 and R2 are the same. In some embodiments, each of R1 and R2 is individually and independently selected from the group consisting of C12 alkyl, C14 alkyl, C16 alkyl, C18 alkyl, C12 alkenyl, C14 alkenyl, C16 alkenyl and C18 alkenyl. In some embodiments, each of C12 alkenyl, C14 alkenyl, C16 alkenyl and C1 8 alkenyl comprises one or two double bonds. In some embodiments, C18 alkenyl is C18 alkenyl with one double bond between C9 and C10. In some embodiments, C18 alkenyl is cis-9-octadecyl.

[0909] In some embodiments, the cationic lipid is a compound of Formula X:

[chemical structure]

In some embodiments, Y⁻ is selected from halogenids, acetate and trifluoroacetate. In some embodiments, the cationic lipid is -arginyl-2,3-diamino propionic acid-N-palmityl-N-oleyl-amide trihydrochloride of Formula III:

[chemical structure]

In some embodiments, the cationic lipid is -arginyl-2,3-diamino propionic acid-N-lauryl-N-myristyl-amide trihydrochloride of Formula IV:

[chemical structure]

In some embodiments, the cationic lipid is -arginyl-lysine-N-lauryl-N-myristyl-amide trihydrochloride of Formula V:

[chemical structure]

[0910] In some embodiments, the sterol compound is cholesterol. In some embodiments, the sterol compound is stigmasterin.

[0911] In some embodiments, the PEG moiety of the PEGylated lipid has a molecular weight from about 800 to 5,000 Da. In some embodiments, the molecular weight of the PEG moiety of the PEGylated lipid is about 800 Da. In some embodiments, the molecular weight of the PEG moiety of the PEGylated lipid is about 2,000 Da. In some embodiments, the molecular weight of the PEG moiety of the PEGylated lipid is about 5,000 Da. In some embodiments, the PEGylated lipid is a PEGylated phosphoethanolamine of Formula VII, wherein each of R³ and R⁴ is individually and independently linear C13-C17 alkyl, and p is any integer from 18, 19 or 20, or from 44, 45 or 46 or from 113, 114 or 115. In some embodiments, R³ and R⁴ are the same. In some embodiments, R³ and R⁴ are different. In some embodiments, each of R³ and R⁴ is individually and independently selected from the group consisting of C13 alkyl, C15 alkyl and C17 alkyl. In some embodiments, the PEGylated phosphoethanolamine of Formula VII is 1,2-distearoyl-sn-glycero-3-phosphoethanolamine-N-[methoxy(polyethylene glycol)-2000](ammonium salt):

[chemical structure]

In some embodiments, the PEGylated phosphoethanolamine of Formula VII is 1,2-distearoyl-sn-glycero-3-phosphoethanolamine-N-[methoxy(polyethylene glycol)-5000](ammonium salt):

[chemical structure]

In some embodiments, the PEGylated lipid is a PEGylated ceramide of Formula VIII, wherein R⁵ is linear C7-C15 alkyl, and q is any integer from 18, 19 or 20, or from 44, 45 or 46 or from 113, 114 or 115. In some embodiments, R⁵ is linear C7 alkyl. In some embodiments, R⁵ is linear C15 alkyl. In some embodiments, the PEGylated ceramide of Formula VIII is N-octanoyl-sphingosine-1-{succinyl[methoxy(polyethylene glycol)2000]}:

[chemical structure]

In some embodiments, the PEGylated ceramide of Formula VIII is N-palmitoyl-sphingosine-1-{succinyl[methoxy(polyethylene glycol)2000]}

[chemical structure]

In some embodiments, the PEGylated lipid is a PEGylated diacylglycerol of Formula IX, wherein each of R⁶ and R⁷ is individually and independently linear C1-C17 alkyl, and r is any integer from 18, 19 or 20, or from 44, 45 or 46 or from 113, 114 or 115. In some embodiments, R⁶ and R⁷ are the same. In some embodiments, R⁶ and R⁷ are different. In some embodiments, each of R⁶ and R⁷ is individually and independently selected from the group consisting of linear C17 alkyl, linear C15 alkyl and linear C13 alkyl. In some embodiments, the PEGylated diacylglycerol of Formula IX 1,2-Distearoyl-sn-glycerol [methoxy(polyethylene glycol)2000]:

[chemical structure]

In some embodiments, the PEGylated diacylglycerol of Formula IX is 1,2-Dipalmitoyl-sn-glycerol [methoxy(polyethylene glycol)2000]:

[chemical structure]

In some embodiments, the PEGylated diacylglycerol of Formula IX is:

[chemical structure]

In some embodiments, the LNP includes at least one cationic lipid selected from of Formulas III, IV, and V, at least one sterol compound selected from a cholesterol and stigmasterin, and wherein the PEGylated lipid is at least one selected from Formulas XI and XII. In some embodiments, the LNP includes at least one cationic lipid selected from Formulas III, IV, and V, at least one sterol compound selected from a cholesterol and stigmasterin, and wherein the PEGylated lipid is at least one selected from Formulas XIII and XIV. In some embodiments, the LNP includes at least one cationic lipid selected from Formulas III, IV, and V, at least one sterol compound selected from a cholesterol and stigmasterin, and wherein the PEGylated lipid is at least one selected from Formulas XV and XVI. In some embodiments, the LNP includes a cationic lipid of Formula III, a cholesterol as the sterol compound, and wherein the PEGylated lipid is Formula XI.

[0912] In any of the LNP embodiments in the previous paragraph, wherein the content of the cationic lipid composition is between about 65 mole % to 75 mole %, the content of the sterol compound is between about 24 mole % to 34 mole % and the content of the PEGylated lipid is between about 0.5 mole % to 1.5 mole %, wherein the sum of the content of the cationic lipid, of the sterol compound and of the PEGylated lipid for the lipid composition is 100 mole %. In some embodiments, the cationic lipid is about 70 mole %, the content of the sterol compound is about 29 mole % and the content of the PEGylated lipid is about 1 mole %. In some embodiments, the LNP is 70 mole % of Formula III, 29 mole % of cholesterol, and 1 mole % of Formula XI.

### Exosomes

[0913] Exosomes are endogenous nano-vesicles that transport RNAs and proteins, and which can deliver RNA to the brain and other target organs. To reduce immunogenicity, Alvarez-Erviti et al. (2011, Nat Biotechnol 29: 341) used self-derived dendritic cells for exosome production. Targeting to the brain was achieved by engineering the dendritic cells to express Lamp2b, an exosomal membrane protein, fused to the neuron-specific RVG peptide. Purified exosomes were loaded with exogenous RNA by electroporation. Intravenously injected RVG-targeted exosomes delivered GAPDH siRNA specifically to neurons, microglia, oligodendrocytes in the brain, resulting in a specific gene knockdown. Pre-exposure to RVG exosomes did not attenuate knockdown, and non-specific uptake in other tissues was not observed. The therapeutic potential of exosome-mediated siRNA delivery was demonstrated by the strong mRNA (60%) and protein (62%) knockdown of BACE1, a therapeutic target in Alzheimer's disease.

[0914] To obtain a pool of immunologically inert exosomes, Alvarez-Erviti et al. harvested bone marrow from inbred C57BL/6 mice with a homogenous major histocompatibility complex (MHC) haplotype. As immature dendritic cells produce large quantities of exosomes devoid of T-cell activators such as MHC-II and CD86, Alvarez-Erviti et al. selected for dendritic cells with granulocyte/macrophage-colony stimulating factor (GM-CSF) for 7 d. Exosomes were purified from the culture supernatant the following day using well-established ultracentrifugation protocols. The exosomes produced were physically homogenous, with a size distribution peaking at 80 nm in diameter as determined by particle tracking analysis (NTA) and electron microscopy. Alvarez-Erviti et al. obtained 6-12 μg of exosomes (measured based on protein concentration) per 106 cells.

[0915] Next, Alvarez-Erviti et al. investigated the possibility of loading modified exosomes with exogenous cargoes using electroporation protocols adapted for nanoscale applications. As electroporation for membrane particles at the nanometer scale is not well-characterized, nonspecific Cy5-labeled RNA was used for the empirical optimization of the electroporation protocol. The amount of encapsulated RNA was assayed after ultracentrifugation and lysis of exosomes. Electroporation at 400 V and 125 μF resulted in the greatest retention of RNA and was used for all subsequent experiments.

[0916] Alvarez-Erviti et al. administered 150 μg of each BACE1 siRNA encapsulated in 150 μg of RVG exosomes to normal C57BL/6 mice and compared the knockdown efficiency to four controls: untreated mice, mice injected with RVG exosomes only, mice injected with BACE1 siRNA complexed to an in vivo cationic liposome reagent and mice injected with BACE1 siRNA complexed to RVG-9R, the RVG peptide conjugated to 9 D-arginines that electrostatically binds to the siRNA. Cortical tissue samples were analyzed 3 d after administration and a significant protein knockdown (45%, P<0.05, versus 62%, P<0.01) in both siRNA-RVG-9R-treated and siRNARVG exosome-treated mice was observed, resulting from a significant decrease in BACE1 mRNA levels (66% [+ or -] 15%, P<0.001 and 61% [+ or -] 13% respectively, P<0.01). Moreover, Applicants demonstrated a significant decrease (55%, P<0.05) in the total [beta]-amyloid 1-42 levels, a main component of the amyloid plaques in Alzheimer's pathology, in the RVG-exosome-treated animals. The decrease observed was greater than the 0-amyloid 1-40 decrease demonstrated in normal mice after intraventricular injection of BACE1 inhibitors. Alvarez-Erviti et al. carried out 5′-rapid amplification of cDNA ends (RACE) on BACE1 cleavage product, which provided evidence of RNAi-mediated knockdown by the siRNA.

[0917] Finally, Alvarez-Erviti et al. investigated whether RNA-RVG exosomes induced immune responses in vivo by assessing IL-6, IP-10, TNFα and IFN-α serum concentrations. Following exosome treatment, nonsignificant changes in all cytokines were registered similar to siRNA-transfection reagent treatment in contrast to siRNA-RVG-9R, which potently stimulated IL-6 secretion, confirming the immunologically inert profile of the exosome treatment. Given that exosomes encapsulate only 20% of siRNA, delivery with RVG-exosome appears to be more efficient than RVG-9R delivery as comparable mRNA knockdown and greater protein knockdown was achieved with fivefold less siRNA without the corresponding level of immune stimulation. This experiment demonstrated the therapeutic potential of RVG-exosome technology, which is potentially suited for long-term silencing of genes related to neurodegenerative diseases. The exosome delivery system of Alvarez-Erviti et al. may be applied to deliver the AD-functionalized CRISPR-Cas system of the present invention to therapeutic targets, especially neurodegenerative diseases. A dosage of about 100 to 1000 mg of CRISPR Cas encapsulated in about 100 to 1000 mg of RVG exosomes may be contemplated for the present invention.

[0918] El-Andaloussi et al. (Nature Protocols 7,2112-2126(2012)) discloses how exosomes derived from cultured cells can be harnessed for delivery of RNA in vitro and in vivo. This protocol first describes the generation of targeted exosomes through transfection of an expression vector, comprising an exosomal protein fused with a peptide ligand. Next, El-Andaloussi et al. explain how to purify and characterize exosomes from transfected cell supernatant. Next, El-Andaloussi et al. detail crucial steps for loading RNA into exosomes. Finally, El-Andaloussi et al. outline how to use exosomes to efficiently deliver RNA in vitro and in vivo in mouse brain. Examples of anticipated results in which exosome-mediated RNA delivery is evaluated by functional assays and imaging are also provided. The entire protocol takes ˜3 weeks. Delivery or administration according to the invention may be performed using exosomes produced from self-derived dendritic cells. From the herein teachings, this can be employed in the practice of the invention.

[0919] In another embodiment, the plasma exosomes of Wahlgren et al. (Nucleic Acids Research, 2012, Vol. 40, No. 17 e130) are contemplated. Exosomes are nano-sized vesicles (30-90 nm in size) produced by many cell types, including dendritic cells (DC), B cells, T cells, mast cells, epithelial cells and tumor cells. These vesicles are formed by inward budding of late endosomes and are then released to the extracellular environment upon fusion with the plasma membrane. Because exosomes naturally carry RNA between cells, this property may be useful in gene therapy, and from this disclosure can be employed in the practice of the instant invention.

[0920] Exosomes from plasma can be prepared by centrifugation of buffy coat at 900 g for 20 min to isolate the plasma followed by harvesting cell supernatants, centrifuging at 300 g for 10 min to eliminate cells and at 16 500 g for 30 min followed by filtration through a 0.22 mm filter. Exosomes are pelleted by ultracentrifugation at 120 000 g for 70 min. Chemical transfection of siRNA into exosomes is carried out according to the manufacturer's instructions in RNAi Human/Mouse Starter Kit (Quiagen, Hilden, Germany). siRNA is added to 100 ml PBS at a final concentration of 2 mmol/ml. After adding HiPerFect transfection reagent, the mixture is incubated for 10 min at RT. In order to remove the excess of micelles, the exosomes are re-isolated using aldehyde/sulfate latex beads. The chemical transfection of CRISPR Cas into exosomes may be conducted similarly to siRNA. The exosomes may be co-cultured with monocytes and lymphocytes isolated from the peripheral blood of healthy donors. Therefore, it may be contemplated that exosomes containing CRISPR Cas may be introduced to monocytes and lymphocytes of and autologously reintroduced into a human. Accordingly, delivery or administration according to the invention may be performed using plasma exosomes.

[0921] Liposomes

[0922] Delivery or administration according to the invention can be performed with liposomes. Liposomes are spherical vesicle structures composed of a uni- or multilamellar lipid bilayer surrounding internal aqueous compartments and a relatively impermeable outer lipophilic phospholipid bilayer. Liposomes have gained considerable attention as drug delivery carriers because they are biocompatible, nontoxic, can deliver both hydrophilic and lipophilic drug molecules, protect their cargo from degradation by plasma enzymes, and transport their load across biological membranes and the blood brain barrier (BBB) (see, e.g., Spuch and Navarro, Journal of Drug Delivery, vol. 2011, Article ID 469679, 12 pages, 2011. doi:10.1155/2011/469679 for review).

[0923] Liposomes can be made from several different types of lipids; however, phospholipids are most commonly used to generate liposomes as drug carriers. Although liposome formation is spontaneous when a lipid film is mixed with an aqueous solution, it can also be expedited by applying force in the form of shaking by using a homogenizer, sonicator, or an extrusion apparatus (see, e.g., Spuch and Navarro, Journal of Drug Delivery, vol. 2011, Article ID 469679, 12 pages, 2011. doi:10.1155/2011/469679 for review).

[0924] Several other additives may be added to liposomes in order to modify their structure and properties. For instance, either cholesterol or sphingomyelin may be added to the liposomal mixture in order to help stabilize the liposomal structure and to prevent the leakage of the liposomal inner cargo. Further, liposomes are prepared from hydrogenated egg phosphatidylcholine or egg phosphatidylcholine, cholesterol, and dicetyl phosphate, and their mean vesicle sizes were adjusted to about 50 and 100 nm. (see, e.g., Spuch and Navarro, Journal of Drug Delivery, vol. 2011, Article ID 469679, 12 pages, 2011. doi:10.1155/2011/469679 for review).

[0925] A liposome formulation may be mainly comprised of natural phospholipids and lipids such as 1,2-distearoryl-sn-glycero-3-phosphatidyl choline (DSPC), sphingomyelin, egg phosphatidylcholines and monosialoganglioside. Since this formulation is made up of phospholipids only, liposomal formulations have encountered many challenges, one of the ones being the instability in plasma. Several attempts to overcome these challenges have been made, specifically in the manipulation of the lipid membrane. One of these attempts focused on the manipulation of cholesterol. Addition of cholesterol to conventional formulations reduces rapid release of the encapsulated bioactive compound into the plasma or 1,2-dioleoyl-sn-glycero-3-phosphoethanolamine (DOPE) increases the stability (see, e.g., Spuch and Navarro, Journal of Drug Delivery, vol. 2011, Article ID 469679, 12 pages, 2011. doi:10.1155/2011/469679 for review).

[0926] In a particularly advantageous embodiment, Trojan Horse liposomes (also known as Molecular Trojan Horses) are desirable and protocols may be found at cshprotocols.cshlp.org/content/2010/4/pdb.prot5407.long. These particles allow delivery of a transgene to the entire brain after an intravascular injection. Without being bound by limitation, it is believed that neutral lipid particles with specific antibodies conjugated to surface allow crossing of the blood brain barrier via endocytosis. Trojan Horse Liposomes may be used to deliver the CRISPR family of nucleases to the brain via an intravascular injection, which would allow whole brain transgenic animals without the need for embryonic manipulation. About 1-5 g of DNA or RNA may be contemplated for in vivo administration in liposomes.

[0927] In another embodiment, the AD-functionalized CRISPR Cas system or components thereof may be administered in liposomes, such as a stable nucleic-acid-lipid particle (SNALP) (see, e.g., Morrissey et al., Nature Biotechnology, Vol. 23, No. 8, August 2005). Daily intravenous injections of about 1, 3 or 5 mg/kg/day of a specific CRISPR Cas targeted in a SNALP are contemplated. The daily treatment may be over about three days and then weekly for about five weeks. In another embodiment, a specific CRISPR Cas encapsulated SNALP) administered by intravenous injection to at doses of about 1 or 2.5 mg/kg are also contemplated (see, e.g., Zimmerman et al., Nature Letters, Vol. 441, 4 May 2006). The SNALP formulation may contain the lipids 3-N-[(wmethoxypoly(ethylene glycol) 2000) carbamoyl]-1,2-dimyristyloxy-propylamine(PEG-C-DMA), 1,2-dilinoleyloxy-N,N-dimethyl-3-aminopropane (DLinDMA), 1,2-distearoyl-sn-glycero-3-phosphocholine (DSPC) and cholesterol, in a 2:40:10:48 molar percent ratio (see, e.g., Zimmerman et al., Nature Letters, Vol. 441, 4 May 2006).

[0928] In another embodiment, stable nucleic-acid-lipid particles (SNALPs) have proven to be effective delivery molecules to highly vascularized HepG2-derived liver tumors but not in poorly vascularized HCT-116 derived liver tumors (see, e.g., Li, Gene Therapy (2012) 19, 775-780). The SNALP liposomes may be prepared by formulating D-Lin-DMA and PEG-C-DMA with distearoylphosphatidylcholine (DSPC), Cholesterol and siRNA using a 25:1 lipid/siRNA ratio and a 48/40/10/2 molar ratio of Cholesterol/D-Lin-DMA/DSPC/PEG-C-DMA. The resulted SNALP liposomes are about 80-100 nm in size.

[0929] In yet another embodiment, a SNALP may comprise synthetic cholesterol (Sigma-Aldrich, St Louis, Mo., USA), dipalmitoylphosphatidylcholine (Avanti Polar Lipids, Alabaster, Ala., USA), 3-N-[(w-methoxy poly(ethylene glycol)2000)carbamoyl]-1,2-dimyrestyloxypropylamine, and cationic 1,2-dilinoleyloxy-3-N,Ndimethylaminopropane (see, e.g., Geisbert et al., Lancet 2010; 375: 1896-905). A dosage of about 2 mg/kg total CRISPR Cas per dose administered as, for example, a bolus intravenous infusion may be contemplated.

[0930] In yet another embodiment, a SNALP may comprise synthetic cholesterol (Sigma-Aldrich), 1,2-distearoyl-sn-glycero-3-phosphocholine (DSPC; Avanti Polar Lipids Inc.), PEG-cDMA, and 1,2-dilinoleyloxy-3-(N;N-dimethyl)aminopropane (DLinDMA) (see, e.g., Judge, J. Clin. Invest. 119:661-673 (2009)). Formulations used for in vivo studies may comprise a final lipid/RNA mass ratio of about 9:1.

[0931] The safety profile of RNAi nanomedicines has been reviewed by Barros and Gollob of Alnylam Pharmaceuticals (see, e.g., Advanced Drug Delivery Reviews 64 (2012) 1730-1737). The stable nucleic acid lipid particle (SNALP) is comprised of four different lipids an ionizable lipid (DLinDMA) that is cationic at low pH, a neutral helper lipid, cholesterol, and a diffusible polyethylene glycol (PEG)-lipid. The particle is approximately 80 nm in diameter and is charge-neutral at physiologic pH. During formulation, the ionizable lipid serves to condense lipid with the anionic RNA during particle formation. When positively charged under increasingly acidic endosomal conditions, the ionizable lipid also mediates the fusion of SNALP with the endosomal membrane enabling release of RNA into the cytoplasm. The PEG-lipid stabilizes the particle and reduces aggregation during formulation, and subsequently provides a neutral hydrophilic exterior that improves pharmacokinetic properties.

[0932] To date, two clinical programs have been initiated using SNALP formulations with RNA. Tekmira Pharmaceuticals recently completed a phase I single-dose study of SNALP-ApoB in adult volunteers with elevated LDL cholesterol. ApoB is predominantly expressed in the liver and jejunum and is essential for the assembly and secretion of VLDL and LDL. Seventeen subjects received a single dose of SNALP-ApoB (dose escalation across 7 dose levels). There was no evidence of liver toxicity (anticipated as the potential dose-limiting toxicity based on preclinical studies). One (of two) subjects at the highest dose experienced flu-like symptoms consistent with immune system stimulation, and the decision was made to conclude the trial.

[0933] Alnylam Pharmaceuticals has similarly advanced ALN-TTRO1, which employs the SNALP technology described above and targets hepatocyte production of both mutant and wild-type TTR to treat TTR amyloidosis (ATTR). Three ATTR syndromes have been described: familial amyloidotic polyneuropathy (FAP) and familial amyloidotic cardiomyopathy (FAC) both caused by autosomal dominant mutations in TTR; and senile systemic amyloidosis (SSA) cause by wildtype TTR. A placebo-controlled, single dose-escalation phase I trial of ALN-TTRO1 was recently completed in patients with ATTR. ALN-TTR01 was administered as a 15-minute IV infusion to 31 patients (23 with study drug and 8 with placebo) within a dose range of 0.01 to 1.0 mg/kg (based on siRNA). Treatment was well tolerated with no significant increases in liver function tests. Infusion-related reactions were noted in 3 of 23 patients at >0.4 mg/kg; all responded to slowing of the infusion rate and all continued on study. Minimal and transient elevations of serum cytokines IL-6, IP-10 and IL-Ira were noted in two patients at the highest dose of 1 mg/kg (as anticipated from preclinical and NHP studies). Lowering of serum TTR, the expected pharmacodynamics effect of ALN-TTR01, was observed at 1 mg/kg.

[0934] In yet another embodiment, a SNALP may be made by solubilizing a cationic lipid, DSPC, cholesterol and PEG-lipid e.g., in ethanol, e.g., at a molar ratio of 40:10:40:10, respectively (see, Semple et al., Nature Niotechnology, Volume 28 Number 2 Feb. 2010, pp. 172-177). The lipid mixture was added to an aqueous buffer (50 mM citrate, pH 4) with mixing to a final ethanol and lipid concentration of 30% (vol/vol) and 6.1 mg/ml, respectively, and allowed to equilibrate at 22° C. for 2 min before extrusion. The hydrated lipids were extruded through two stacked 80 nm pore-sized filters (Nuclepore) at 22° C. using a Lipex Extruder (Northern Lipids) until a vesicle diameter of 70-90 nm, as determined by dynamic light scattering analysis, was obtained. This generally required 1-3 passes. The siRNA (solubilized in a 50 mM citrate, pH 4 aqueous solution containing 30% ethanol) was added to the pre-equilibrated (35° C.) vesicles at a rate of 5 ml/min with mixing. After a final target siRNA/lipid ratio of 0.06 (wt/wt) was reached, the mixture was incubated for a further 30 min at 35° C. to allow vesicle reorganization and encapsulation of the siRNA. The ethanol was then removed and the external buffer replaced with PBS (155 mM NaCl, 3 mM Na2HPO4, 1 mM KH2PO4, pH 7.5) by either dialysis or tangential flow diafiltration. siRNA were encapsulated in SNALP using a controlled step-wise dilution method process. The lipid constituents of KC2-SNALP were DLin-KC2-DMA (cationic lipid), dipalmitoylphosphatidylcholine (DPPC; Avanti Polar Lipids), synthetic cholesterol (Sigma) and PEG-C-DMA used at a molar ratio of 57.1:7.1:34.3:1.4. Upon formation of the loaded particles, SNALP were dialyzed against PBS and filter sterilized through a 0.2 m filter before use. Mean particle sizes were 75-85 nm and 90-95% of the siRNA was encapsulated within the lipid particles. The final siRNA/lipid ratio in formulations used for in vivo testing was ˜0.15 (wt/wt). LNP-siRNA systems containing Factor VII siRNA were diluted to the appropriate concentrations in sterile PBS immediately before use and the formulations were administered intravenously through the lateral tail vein in a total volume of 10 ml/kg. This method and these delivery systems may be extrapolated to the AD-functionalized CRISPR Cas system of the present invention.

### Other Lipids

[0935] Other cationic lipids, such as amino lipid 2,2-dilinoleyl-4-dimethylaminoethyl-[1,3]-dioxolane (DLin-KC2-DMA) may be utilized to encapsulate CRISPR Cas or components thereof or nucleic acid molecule(s) coding therefor e.g., similar to SiRNA (see, e.g., Jayaraman, Angew. Chem. Int. Ed. 2012, 51, 8529-8533), and hence may be employed in the practice of the invention. A preformed vesicle with the following lipid composition may be contemplated: amino lipid, distearoylphosphatidylcholine (DSPC), cholesterol and (R)-2,3-bis(octadecyloxy) propyl-1-(methoxy poly(ethylene glycol)2000)propylcarbamate (PEG-lipid) in the molar ratio 40/10/40/10, respectively, and a FVII siRNA/total lipid ratio of approximately 0.05 (w/w). To ensure a narrow particle size distribution in the range of 70-90 nm and a low polydispersity index of 0.11+0.04 (n=56), the particles may be extruded up to three times through 80 nm membranes prior to adding the guide RNA. Particles containing the highly potent amino lipid 16 may be used, in which the molar ratio of the four lipid components 16, DSPC, cholesterol and PEG-lipid (50/10/38.5/1.5) which may be further optimized to enhance in vivo activity.

[0936] Michael S D Kormann et al. (“Expression of therapeutic proteins after delivery of chemically modified mRNA in mice: Nature Biotechnology, Volume: 29, Pages: 154-157 (2011)) describes the use of lipid envelopes to deliver RNA. Use of lipid envelopes is also preferred in the present invention.

[0937] In another embodiment, lipids may be formulated with the AD-functionalized CRISPR Cas system of the present invention or component(s) thereof or nucleic acid molecule(s) coding therefor to form lipid nanoparticles (LNPs). Lipids include, but are not limited to, DLin-KC2-DMA4, C12-200 and colipids disteroylphosphatidyl choline, cholesterol, and PEG-DMG may be formulated with CRISPR Cas instead of siRNA (see, e.g., Novobrantseva, Molecular Therapy-Nucleic Acids (2012) 1, e4; doi:10.1038/mtna.2011.3) using a spontaneous vesicle formation procedure. The component molar ratio may be about 50/10/38.5/1.5 (DLin-KC2-DMA or C12-200/disteroylphosphatidyl choline/cholesterol/PEG-DMG). The final lipid:siRNA weight ratio may be ˜12:1 and 9:1 in the case of DLin-KC2-DMA and C12-200 lipid nanoparticles (LNPs), respectively. The formulations may have mean particle diameters of −80 nm with >90% entrapment efficiency. A 3 mg/kg dose may be contemplated.

[0938] Tekmira has a portfolio of approximately 95 patent families, in the U.S. and abroad, that are directed to various aspects of LNPs and LNP formulations (see, e.g., U.S. Pat. Nos. 7,982,027; 7,799,565; 8,058,069; 8,283,333; 7,901,708; 7,745,651; 7,803,397; 8,101,741; 8,188,263; 7,915,399; 8,236,943 and 7,838,658 and European Pat. Nos 1766035; 1519714; 1781593 and 1664316), all of which may be used and/or adapted to the present invention.

[0939] The AD-functionalized CRISPR Cas system or components thereof or nucleic acid molecule(s) coding therefor may be delivered encapsulated in PLGA Microspheres such as that further described in US published applications 20130252281 and 20130245107 and 20130244279 (assigned to Moderna Therapeutics) which relate to aspects of formulation of compositions comprising modified nucleic acid molecules which may encode a protein, a protein precursor, or a partially or fully processed form of the protein or a protein precursor. The formulation may have a molar ratio 50:10:38.5:1.5-3.0 (cationic lipid:fusogenic lipid:cholesterol:PEG lipid). The PEG lipid may be selected from, but is not limited to PEG-c-DOMG, PEG-DMG. The fusogenic lipid may be DSPC. See also, Schrum et al., Delivery and Formulation of Engineered Nucleic Acids, US published application 20120251618.

[0940] Nanomerics' technology addresses bioavailability challenges for a broad range of therapeutics, including low molecular weight hydrophobic drugs, peptides, and nucleic acid based therapeutics (plasmid, siRNA, miRNA). Specific administration routes for which the technology has demonstrated clear advantages include the oral route, transport across the blood-brain-barrier, delivery to solid tumours, as well as to the eye. See, e.g., Mazza et al., 2013, ACS Nano. 2013 Feb. 26; 7(2):1016-26; Uchegbu and Siew, 2013, J Pharm Sci. 102(2):305-10 and Lalatsa et al., 2012, J Control Release. 2012 Jul. 20; 161(2):523-36.

[0941] US Patent Publication No. 20050019923 describes cationic dendrimers for delivering bioactive molecules, such as polynucleotide molecules, peptides and polypeptides and/or pharmaceutical agents, to a mammalian body. The dendrimers are suitable for targeting the delivery of the bioactive molecules to, for example, the liver, spleen, lung, kidney or heart (or even the brain). Dendrimers are synthetic 3-dimensional macromolecules that are prepared in a step-wise fashion from simple branched monomer units, the nature and functionality of which can be easily controlled and varied. Dendrimers are synthesised from the repeated addition of building blocks to a multifunctional core (divergent approach to synthesis), or towards a multifunctional core (convergent approach to synthesis) and each addition of a 3-dimensional shell of building blocks leads to the formation of a higher generation of the dendrimers. Polypropylenimine dendrimers start from a diaminobutane core to which is added twice the number of amino groups by a double Michael addition of acrylonitrile to the primary amines followed by the hydrogenation of the nitriles. This results in a doubling of the amino groups. Polypropylenimine dendrimers contain 100% protonable nitrogens and up to 64 terminal amino groups (generation 5, DAB 64). Protonable groups are usually amine groups which are able to accept protons at neutral pH. The use of dendrimers as gene delivery agents has largely focused on the use of the polyamidoamine. and phosphorous containing compounds with a mixture of amine/amide or N—P(O2)S as the conjugating units respectively with no work being reported on the use of the lower generation polypropylenimine dendrimers for gene delivery. Polypropylenimine dendrimers have also been studied as pH sensitive controlled release systems for drug delivery and for their encapsulation of guest molecules when chemically modified by peripheral amino acid groups. The cytotoxicity and interaction of polypropylenimine dendrimers with DNA as well as the transfection efficacy of DAB 64 has also been studied.

[0942] US Patent Publication No. 20050019923 is based upon the observation that, contrary to earlier reports, cationic dendrimers, such as polypropylenimine dendrimers, display suitable properties, such as specific targeting and low toxicity, for use in the targeted delivery of bioactive molecules, such as genetic material. In addition, derivatives of the cationic dendrimer also display suitable properties for the targeted delivery of bioactive molecules. See also, Bioactive Polymers, US published application 20080267903, which discloses “Various polymers, including cationic polyamine polymers and dendrimeric polymers, are shown to possess anti-proliferative activity, and may therefore be useful for treatment of disorders characterized by undesirable cellular proliferation such as neoplasms and tumors, inflammatory disorders (including autoimmune disorders), psoriasis and atherosclerosis. The polymers may be used alone as active agents, or as delivery vehicles for other therapeutic agents, such as drug molecules or nucleic acids for gene therapy. In such cases, the polymers' own intrinsic anti-tumor activity may complement the activity of the agent to be delivered.” The disclosures of these patent publications may be employed in conjunction with herein teachings for delivery of AD-functionalized CRISPR Cas system(s) or component(s) thereof or nucleic acid molecule(s) coding therefor.

### Supercharged Proteins

[0943] Supercharged proteins are a class of engineered or naturally occurring proteins with unusually high positive or negative net theoretical charge and may be employed in delivery of AD-functionalized CRISPR Cas system(s) or component(s) thereof or nucleic acid molecule(s) coding therefor. Both supernegatively and superpositively charged proteins exhibit a remarkable ability to withstand thermally or chemically induced aggregation. Superpositively charged proteins are also able to penetrate mammalian cells. Associating cargo with these proteins, such as plasmid DNA, RNA, or other proteins, can enable the functional delivery of these macromolecules into mammalian cells both in vitro and in vivo. The creation and characterization of supercharged proteins has been reported in 2007 (Lawrence et al., 2007, Journal of the American Chemical Society 129, 10110-10112).

[0944] The nonviral delivery of RNA and plasmid DNA into mammalian cells are valuable both for research and therapeutic applications (Akinc et al., 2010, Nat. Biotech. 26, 561-569). Purified +36 GFP protein (or other superpositively charged protein) is mixed with RNAs in the appropriate serum-free media and allowed to complex prior addition to cells. Inclusion of serum at this stage inhibits formation of the supercharged protein-RNA complexes and reduces the effectiveness of the treatment. The following protocol has been found to be effective for a variety of cell lines (McNaughton et al., 2009, Proc. Natl. Acad. Sci. USA 106, 6111-6116) (However, pilot experiments varying the dose of protein and RNA should be performed to optimize the procedure for specific cell lines): (1) One day before treatment, plate 1×105 cells per well in a 48-well plate. (2) On the day of treatment, dilute purified +36 GFP protein in serum-free media to a final concentration 200 nM. Add RNA to a final concentration of 50 nM. Vortex to mix and incubate at room temperature for 10 min. (3) During incubation, aspirate media from cells and wash once with PBS. (4) Following incubation of +36 GFP and RNA, add the protein-RNA complexes to cells. (5) Incubate cells with complexes at 37° C. for 4h. (6) Following incubation, aspirate the media and wash three times with 20 U/mL heparin PBS. Incubate cells with serum-containing media for a further 48h or longer depending upon the assay for activity. (7) Analyze cells by immunoblot, qPCR, phenotypic assay, or other appropriate method.

[0945] It has been further found +36 GFP to be an effective plasmid delivery reagent in a range of cells. As plasmid DNA is a larger cargo than siRNA, proportionately more +36 GFP protein is required to effectively complex plasmids. For effective plasmid delivery Applicants have developed a variant of +36 GFP bearing a C-terminal HA2 peptide tag, a known endosome-disrupting peptide derived from the influenza virus hemagglutinin protein. The following protocol has been effective in a variety of cells, but as above it is advised that plasmid DNA and supercharged protein doses be optimized for specific cell lines and delivery applications: (1) One day before treatment, plate 1×105 per well in a 48-well plate. (2) On the day of treatment, dilute purified 36 GFP protein in serum-free media to a final concentration 2 mM. Add 1 mg of plasmid DNA. Vortex to mix and incubate at room temperature for 10 min. (3) During incubation, aspirate media from cells and wash once with PBS. (4) Following incubation of 36 GFP and plasmid DNA, gently add the protein-DNA complexes to cells. (5) Incubate cells with complexes at 37 C for 4h. (6) Following incubation, aspirate the media and wash with PBS. Incubate cells in serum-containing media and incubate for a further 24-48h. (7) Analyze plasmid delivery (e.g., by plasmid-driven gene expression) as appropriate.

[0946] See also, e.g., McNaughton et al., Proc. Natl. Acad. Sci. USA 106, 6111-6116 (2009); Cronican et al., ACS Chemical Biology 5, 747-752 (2010); Cronican et al., Chemistry & Biology 18, 833-838 (2011); Thompson et al., Methods in Enzymology 503, 293-319 (2012); Thompson, D. B., et al., Chemistry & Biology 19 (7), 831-843 (2012). The methods of the super charged proteins may be used and/or adapted for delivery of the AD-functionalized CRISPR Cas system of the present invention. These systems in conjunction with herein teaching can be employed in the delivery of AD-functionalized CRISPR Cas system(s) or component(s) thereof or nucleic acid molecule(s) coding therefor

### Cell Penetrating Peptides (CPPs)

[0947] In yet another embodiment, cell penetrating peptides (CPPs) are contemplated for the delivery of the AD-functionalized CRISPR Cas system. CPPs are short peptides that facilitate cellular uptake of various molecular cargo (from nanosize particles to small chemical molecules and large fragments of DNA). The term “cargo” as used herein includes but is not limited to the group consisting of therapeutic agents, diagnostic probes, peptides, nucleic acids, antisense oligonucleotides, plasmids, proteins, particles, including nanoparticles, liposomes, chromophores, small molecules and radioactive materials. In aspects of the invention, the cargo may also comprise any component of the AD-functionalized CRISPR Cas system or the entire AD-functionalized functional CRISPR Cas system. Aspects of the present invention further provide methods for delivering a desired cargo into a subject comprising: (a) preparing a complex comprising the cell penetrating peptide of the present invention and a desired cargo, and (b) orally, intraarticularly, intraperitoneally, intrathecally, intrarterially, intranasally, intraparenchymally, subcutaneously, intramuscularly, intravenously, dermally, intrarectally, or topically administering the complex to a subject. The cargo is associated with the peptides either through chemical linkage via covalent bonds or through non-covalent interactions.

[0948] The function of the CPPs are to deliver the cargo into cells, a process that commonly occurs through endocytosis with the cargo delivered to the endosomes of living mammalian cells. Cell-penetrating peptides are of different sizes, amino acid sequences, and charges but all CPPs have one distinct characteristic, which is the ability to translocate the plasma membrane and facilitate the delivery of various molecular cargoes to the cytoplasm or an organelle. CPP translocation may be classified into three main entry mechanisms: direct penetration in the membrane, endocytosis-mediated entry, and translocation through the formation of a transitory structure. CPPs have found numerous applications in medicine as drug delivery agents in the treatment of different diseases including cancer and virus inhibitors, as well as contrast agents for cell labeling. Examples of the latter include acting as a carrier for GFP, MRI contrast agents, or quantum dots. CPPs hold great potential as in vitro and in vivo delivery vectors for use in research and medicine. CPPs typically have an amino acid composition that either contains a high relative abundance of positively charged amino acids such as lysine or arginine or has sequences that contain an alternating pattern of polar/charged amino acids and non-polar, hydrophobic amino acids. These two types of structures are referred to as polycationic or amphipathic, respectively. A third class of CPPs are the hydrophobic peptides, containing only apolar residues, with low net charge or have hydrophobic amino acid groups that are crucial for cellular uptake. One of the initial CPPs discovered was the transactivating transcriptional activator (Tat) from Human Immunodeficiency Virus 1 (HIV-1) which was found to be efficiently taken up from the surrounding media by numerous cell types in culture. Since then, the number of known CPPs has expanded considerably and small molecule synthetic analogues with more effective protein transduction properties have been generated. CPPs include but are not limited to Penetratin, Tat (48-60), Transportan, and (R-AhX-R4) (Ahx=aminohexanoyl).

[0949] U.S. Pat. No. 8,372,951, provides a CPP derived from eosinophil cationic protein (ECP) which exhibits highly cell-penetrating efficiency and low toxicity. Aspects of delivering the CPP with its cargo into a vertebrate subject are also provided. Further aspects of CPPs and their delivery are described in U.S. Pat. Nos. 8,575,305; 8,614,194 and 8,044,019. CPPs can be used to deliver the AD-functionalized CRISPR-Cas system or components thereof. That CPPs can be employed to deliver the AD-functionalized CRISPR-Cas system or components thereof is also provided in the manuscript “Gene disruption by cell-penetrating peptide-mediated delivery of Cas9 protein and guide RNA”, by Suresh Ramakrishna, Abu-Bonsrah Kwaku Dad, Jagadish Beloor, et al. Genome Res. 2014 Apr. 2, incorporated by reference in its entirety, wherein it is demonstrated that treatment with CPP-conjugated recombinant Cas9 protein and CPP-complexed guide RNAs lead to endogenous gene disruptions in human cell lines. In the paper the Cas9 protein was conjugated to CPP via a thioether bond, whereas the guide RNA was complexed with CPP, forming condensed, positively charged particles. It was shown that simultaneous and sequential treatment of human cells, including embryonic stem cells, dermal fibroblasts, HEK293T cells, HeLa cells, and embryonic carcinoma cells, with the modified Cas9 and guide RNA led to efficient gene disruptions with reduced off-target mutations relative to plasmid transfections.

### Aerosol Delivery

[0950] Subjects treated for a lung disease may for example receive pharmaceutically effective amount of aerosolized AAV vector system per lung endobronchially delivered while spontaneously breathing. As such, aerosolized delivery is preferred for AAV delivery in general. An adenovirus or an AAV particle may be used for delivery. Suitable gene constructs, each operably linked to one or more regulatory sequences, may be cloned into the delivery vector.

### Packaging and Promoters

[0951] The promoter used to drive CRISPR-Cas protein and optionally a functional domain (e.g., adenosine deaminase) coding nucleic acid molecule expression can include AAV ITR, which can serve as a promoter. This is advantageous for eliminating the need for an additional promoter element (which can take up space in the vector). The additional space freed up can be used to drive the expression of additional elements (gRNA, etc.). Also, ITR activity is relatively weaker, so can be used to reduce potential toxicity due to over expression of C2c1.

[0952] For ubiquitous expression, promoters that can be used include: CMV, CAG, CBh, PGK, SV40, Ferritin heavy or light chains, etc. For brain or other CNS expression, SynapsinI can be used for all neurons, CaMKIIalpha can be used for excitatory neurons, GAD67 or GAD65 or VGAT can be used for GABAergic neurons. For liver expression, Albumin promoter can be used. For lung expression, SP-B can be used. For endothelial cells, ICAM can be used. For hematopoietic cells, IFNbeta or CD45 can be used. For Osteoblasts, the OG-2 can be used.

[0953] The promoter used to drive guide RNA can include Pol III promoters such as U6 or H1, as well as use of Pol II promoter and intronic cassettes to express guide RNA.

[0954] In certain embodiments, the CRISPR-Cas system is delivered using adeno associated virus (AAV), leukemia virus (MuMLV), lentivirus, adenovirus or other plasmid or viral vector types.

### Adeno Associated Virus (AAV)

[0955] The CRISPR-Cas protein, adenosine deaminase, and one or more guide RNA can be delivered using adeno associated virus (AAV), lentivirus, adenovirus or other plasmid or viral vector types, in particular, using formulations and doses from, for example, U.S. Pat. No. 8,454,972 (formulations, doses for adenovirus), U.S. Pat. No. 8,404,658 (formulations, doses for AAV) and U.S. Pat. No. 5,846,946 (formulations, doses for DNA plasmids) and from clinical trials and publications regarding the clinical trials involving lentivirus, AAV and adenovirus. For examples, for AAV, the route of administration, formulation and dose can be as in U.S. Pat. No. 8,454,972 and as in clinical trials involving AAV. For Adenovirus, the route of administration, formulation and dose can be as in U.S. Pat. No. 8,404,658 and as in clinical trials involving adenovirus. For plasmid delivery, the route of administration, formulation and dose can be as in U.S. Pat. No. 5,846,946 and as in clinical studies involving plasmids. Doses may be based on or extrapolated to an average 70 kg individual (e.g. a male adult human), and can be adjusted for patients, subjects, mammals of different weight and species. Frequency of administration is within the ambit of the medical or veterinary practitioner (e.g., physician, veterinarian), depending on usual factors including the age, sex, general health, other conditions of the patient or subject and the particular condition or symptoms being addressed. The viral vectors can be injected into the tissue of interest. For cell-type specific genome modification, the expression of C2c1 and adenosine deaminase can be driven by a cell-type specific promoter. For example, liver-specific expression might use the Albumin promoter and neuron-specific expression (e.g. for targeting CNS disorders) might use the Synapsin I promoter.

[0956] In terms of in vivo delivery, AAV is advantageous over other viral vectors for a couple of reasons: low toxicity (this may be due to the purification method not requiring ultra centrifugation of cell particles that can activate the immune response); and low probability of causing insertional mutagenesis because it doesn't integrate into the host genome.

[0957] AAV has a packaging limit of 4.5 or 4.75 Kb. This means that C2c1 as well as a promoter and transcription terminator have to be all fit into the same viral vector. Constructs larger than 4.5 or 4.75 Kb will lead to significantly reduced virus production. SpCas9 is quite large, the gene itself is over 4.1 Kb, which makes it difficult for packing into AAV. Therefore embodiments of the invention include utilizing homologs of C2c1 that are shorter. In some embodiments, the virus capsid comprises one or more of the VP1, VP2, VP3 capsid proteins.

[0958] As to AAV, the AAV can be AAV1, AAV2, AAV5 or any combination thereof. One can select the AAV of the AAV with regard to the cells to be targeted; e.g., one can select AAV serotypes 1, 2, 5 or a hybrid capsid AAV1, AAV2, AAV5 or any combination thereof for targeting brain or neuronal cells; and one can select AAV4 for targeting cardiac tissue. AAV8 is useful for delivery to the liver. The herein promoters and vectors are preferred individually. A tabulation of certain AAV serotypes as to these cells (see Grimm, D. et al, J. Virol. 82: 5887-5911 (2008)) is as follows:

| Cell Line | AAV-1 | AAV-2 | AAV-3 | AAV-4 | AAV-5 | AAV-6 | AAV-8 | AAV-9 |
|---|---|---|---|---|---|---|---|---|
| Huh-7 | 13 | 100 | 2.5 | 0.0 | 0.1 | 10 | 0.7 | 0.0 |
| HEK293 | 25 | 100 | 2.5 | 0.1 | 0.1 | 5 | 0.7 | 0.1 |
| HeLa | 3 | 100 | 2.0 | 0.1 | 6.7 | 1 | 0.2 | 0.1 |
| HepG2 | 3 | 100 | 16.7 | 0.3 | 1.7 | 5 | 0.3 | ND |
| Hep1A | 20 | 100 | 0.2 | 1.0 | 0.1 | 1 | 0.2 | 0.0 |
| 911 | 17 | 100 | 11 | 0.2 | 0.1 | 17 | 0.1 | ND |
| CHO | 100 | 100 | 14 | 1.4 | 333 | 50 | 10 | 1.0 |
| COS | 33 | 100 | 33 | 3.3 | 5.0 | 14 | 2.0 | 0.5 |
| MeWo | 10 | 100 | 20 | 0.3 | 6.7 | 10 | 1.0 | 0.2 |
| NIH3T3 | 10 | 100 | 2.9 | 2.9 | 0.3 | 10 | 0.3 | ND |
| A549 | 14 | 100 | 20 | ND | 0.5 | 10 | 0.5 | 0.1 |
| HT1180 | 20 | 100 | 10 | 0.1 | 0.3 | 33 | 0.5 | 0.1 |
| Monocytes | 1111 | 100 | ND | ND | 125 | 1429 | ND | ND |
| Immature | 2500 | 100 | ND | ND | 222 | 2857 | ND | ND |
| DC | | | | | | | | |
| Mature DC | 2222 | 100 | ND | ND | 333 | 3333 | ND | ND |

### Lentiviruses

[0959] Lentiviruses are complex retroviruses that have the ability to infect and express their genes in both mitotic and post-mitotic cells. The most commonly known lentivirus is the human immunodeficiency virus (HIV), which uses the envelope glycoproteins of other viruses to target a broad range of cell types.

[0960] Lentiviruses may be prepared as follows. After cloning pCasES10 (which contains a lentiviral transfer plasmid backbone), HEK293FT at low passage (p=5) were seeded in a T-75 flask to 50% confluence the day before transfection in DMEM with 10% fetal bovine serum and without antibiotics. After 20 hours, media was changed to OptiMEM (serum-free) media and transfection was done 4 hours later. Cells were transfected with 10 μg of lentiviral transfer plasmid (pCasES10) and the following packaging plasmids: 5 μg of pMD2.G (VSV-g pseudotype), and 7.5 ug of psPAX2 (gag/pol/rev/tat). Transfection was done in 4 mL OptiMEM with a cationic lipid delivery agent (50 uL Lipofectamine 2000 and 100u1 Plus reagent). After 6 hours, the media was changed to antibiotic-free DMEM with 10% fetal bovine serum. These methods use serum during cell culture, but serum-free methods are preferred.

[0961] Lentivirus may be purified as follows. Viral supernatants were harvested after 48 hours. Supernatants were first cleared of debris and filtered through a 0.45 um low protein binding (PVDF) filter. They were then spun in a ultracentrifuge for 2 hours at 24,000 rpm. Viral pellets were resuspended in 50 ul of DMEM overnight at 4 C. They were then aliquoted and immediately frozen at −80° C.

[0962] In another embodiment, minimal non-primate lentiviral vectors based on the equine infectious anemia virus (EIAV) are also contemplated, especially for ocular gene therapy (see, e.g., Balagaan, J Gene Med 2006; 8: 275-285). In another embodiment, RetinoStat®, an equine infectious anemia virus-based lentiviral gene therapy vector that expresses angiostatic proteins endostatin and angiostatin that is delivered via a subretinal injection for the treatment of the web form of age-related macular degeneration is also contemplated (see, e.g., Binley et al., HUMAN GENE THERAPY 23:980-991 (September 2012)) and this vector may be modified for the AD-functionalized CRISPR-Cas system of the present invention.

[0963] In another embodiment, self-inactivating lentiviral vectors with an siRNA targeting a common exon shared by HIV tat/rev, a nucleolar-localizing TAR decoy, and an anti-CCR5-specific hammerhead ribozyme (see, e.g., DiGiusto et al. (2010) Sci Transl Med 2:36ra43) may be used/and or adapted to the AD-functionalized CRISPR-Cas system of the present invention. A minimum of 2.5×106 CD34+ cells per kilogram patient weight may be collected and prestimulated for 16 to 20 hours in X-VIVO 15 medium (Lonza) containing 2 μmol/L-glutamine, stem cell factor (100 ng/ml), Flt-3 ligand (Flt-3L) (100 ng/ml), and thrombopoietin (10 ng/ml) (CellGenix) at a density of 2×106 cells/ml. Prestimulated cells may be transduced with lentiviral at a multiplicity of infection of 5 for 16 to 24 hours in 75-cm² tissue culture flasks coated with fibronectin (25 mg/cm²) (RetroNectin, Takara Bio Inc.).

[0964] Lentiviral vectors have been disclosed as in the treatment for Parkinson's Disease, see, e.g., US Patent Publication No. 20120295960 and U.S. Pat. Nos. 7,303,910 and 7,351,585. Lentiviral vectors have also been disclosed for the treatment of ocular diseases, see e.g., US Patent Publication Nos. 20060281180, 20090007284, US20110117189; US20090017543; US20070054961, US20100317109. Lentiviral vectors have also been disclosed for delivery to the brain, see, e.g., US Patent Publication Nos. US20110293571; US20110293571, US20040013648, US20070025970, US20090111106 and U.S. Pat. No. 7,259,015.

### Polymer-Based Particles

[0965] The systems and compositions herein may be delivered using polymer-based particles (e.g., nanoparticles). In some embodiments, the polymer-based particles may mimic a viral mechanism of membrane fusion. The polymer-based particles may be a synthetic copy of Influenza virus machinery and form transfection complexes with various types of nucleic acids ((siRNA, miRNA, plasmid DNA or shRNA, mRNA) that cells take up via the endocytosis pathway, a process that involves the formation of an acidic compartment. The low pH in late endosomes acts as a chemical switch that renders the particle surface hydrophobic and facilitates membrane crossing. Once into the cytosol, the particle releases its payload for cellular action. This Active Endosome Escape technology is safe and maximizes transfection efficiency as it is using a natural uptake pathway. In some embodiments, the polymer-based particles may comprise alkylated and carboxyalkylated branched polyethylenimine. In some examples, the polymer-based particles are VIROMER, e.g., VIROMER RNAi, VIROMER RED, VIROMER mRNA, VIROMER CRISPR. Example methods of delivering the systems and compositions herein include those described in Bawage S S et al., Synthetic mRNA expressed Cas13a mitigates RNA virus infections, www.biorxiv.org/content/10.1101/370460v1.full doi: doi.org/10.1101/370460, Viromer® RED, a powerful tool for transfection of keratinocytes. doi: 10.13140/RG.2.2.16993.61281, Viromer® Transfection—Factbook 2018: technology, product overview, users' data, doi:10.13140/RG.2.2.23912.16642.

### Applications in General

[0966] The present disclosure provides methods of modifying expression of a target nucleic acid (e.g., DNA), or one or more target nucleic acids with the components and systems herein. In some embodiments, the methods comprise contacting a target nucleic acid with one or more non-naturally occurring or engineered compositions or systems herein. For example, the present disclosure provides a method of modifying a target gene of interest, the method comprising contacting a target DNA with one or more non-naturally occurring or engineered compositions comprising: i) a Cas12b effector protein from Table 1 or 2, ii) a crRNA comprising a) a 3′ guide sequence that is capable of hybridizing to a target DNA sequence, and b) a 5′ direct repeat sequence, and iii) a tracr RNA, whereby there is formed a CRISPR complex comprising the Cas12b effector protein complexed with the crRNA and the tracr RNA, wherein the guide sequence directs sequence-specific binding to the target RNA sequence in a cell, whereby expression of the target locus of interest is modified.

[0967] The methods may be used for modifying the expression of a target gene. The modification may alter the expression of the target gene as compared to the expression of the target gene without or before the treatment with the systems or compositions. The modification may increase the expression of the target gene as compared to the expression of the target gene without or before the treatment with the systems or compositions. The modification may decrease the expression of the target gene as compared to the expression of the target gene without or before the treatment with the systems or compositions.

[0968] In some embodiments, the methods may comprise modifying one or more bases (e.g., adenine or cytosine) in a target oligonucleotide. Such methods may comprise delivering one or more components of the base editor herein to the target oligonucleotide. In some examples, the methods comprising delivering to said target oligonucleotide: a catalytically inactive Cas12b protein; a guide molecule which comprises a guide sequence linked to a direct repeat; and an adenosine or cytidine deaminase protein or catalytic domain thereof; wherein said adenosine or cytidine deaminase protein or catalytic domain thereof is covalently or non-covalently linked to said catalytically inactive Cas12b protein or said guide molecule or is adapted to linked thereto after delivery; wherein said guide molecule forms a complex with said catalytically inactive Cas12b and directs said complex to bind said target oligonucleotide, wherein said guide sequence is capable of hybridizing with a target sequence within said target oligonucleotide to form an oligonucleotide duplex. In some embodiments, the cytosine is outside the target sequence that forms the oligonucleotide duplex, wherein the cytidine deaminase protein or catalytic domain thereof deaminates the Cytosine outside the RNA duplex, or (B) the Cytosine is within the target sequence that forms the RNA duplex, wherein the guide sequence comprises a non-pairing Adenine or Uracil at a position corresponding to the Cytosine resulting in a C-A or C-U mismatch in the RNA duplex, and wherein the cytidine deaminase protein or catalytic domain thereof deaminates the Cytosine in the RNA duplex opposite to the non-pairing Adenine or Uracil. The guide molecule forms a complex with said CRISPR effector protein and directs said complex to bind the target oligonucleotide sequence of interest, wherein the guide sequence is capable of hybridizing with a target sequence comprising the Adenine or Cytosine to form an RNA duplex; wherein the adenosine deaminase protein or catalytic domain thereof deaminates the Adenine or Cytosine in the RNA duplex.

[0969] In some embodiments, the methods and systems may be use for detecting the presence of a nucleic acid target sequence in one or more samples. In some embodiments, a system for detecting the presence of nucleic acid target sequences in one or more in vitro samples may comprise: a Cas12b protein; at least one guide polynucleotide comprising a guide sequence designed to have a degree of complementarity with the target sequence, and designed to form a complex with the Cas12b; and an oligonucleotide-based masking construct comprising a non-target sequence; wherein the Cas12b exhibits collateral nuclease activity and cleaves the non-target sequence of the oligo-nucleotide based masking construct once activated by the target sequence. In certain embodiments, a system for detecting the presence of target polypeptides in one or more in vitro samples comprising: a Cas12b protein; one or more detection aptamers, each designed to bind to one of the one or more target polypeptides, each detection aptamer comprising a masked prompter binding site or masked primer binding site and a trigger sequence template; and an oligonucleotide-based masking construct comprising a non-target sequence. A method for detecting nucleic acid sequences in one or more in vitro samples may comprise: contacting one or more samples with: i) a Cas12b effector protein ii) at least one guide polynucleotide comprising a guide sequence designed to have a degree of complementarity with the target sequence, and designed to form a complex with the Cas12b effector protein; and iii) an oligonucleotide-based masking construct comprising a non-target sequence; and wherein said Cas12 effector protein exhibits collateral nuclease activity and cleaves the non-target sequence of the oligo-nucleotide-based masking construct.

[0970] In another aspect, the present disclosure provides methods for providing a enzymatic (e.g., proteolytic) activity in a cell containing a target oligonucleotide. The methods may comprise contacting the cell(s) with a first Cas protein linked to an inactive portion of an enzyme, and a second Cas protein linked to a complementary portion of the enzyme. The activity of the enzyme is reconstituted when the inactive portion and the complementary portion of the enzyme are contacted. In some embodiments, the method of providing a proteolytic activity in a cell containing a target oligonucleotide comprises a) contacting a cell or population of cells with: i) a first Cas12b effector protein linked to an inactive portion of a proteolytic enzyme; ii) a second Cas12b effector protein linked to a complementary portion the proteolytic enzyme, wherein proteolytic activity of the proteolytic enzyme is reconstituted when the first portion and the complementary portion of the proteolytic enzyme are contacted; iii) a first guide that binds to the first Cas12b effector protein and hybridizes to a first target sequence of the RNA; and iv) a second guide that binds to the second Cas12b effector protein and hybridizes to a second target sequence of the RNA, whereby the first portion and a second portion of the proteolytic enzyme are contacted and the proteolytic activity of the proteolytic enzyme is reconstituted.

[0971] In another aspect, the present disclosure provides methods for identifying a cell containing an oligonucleotide of interest. The methods may comprise identifying the cell(s) with a first Cas protein linked to an inactive portion of a reporter, and a second Cas protein linked to a complementary portion of the reporter. The activity of the reporter is reconstituted when the inactive portion and the complementary portion of the reporter are contacted. In some embodiments, a method of identifying a cell containing an oligonucleotide of interest, the method comprising contacting the oligonucleotide in the cell with a composition which comprises: i) a first Cas12b effector protein linked to an inactive first portion of a reporter; ii) a second Cas12b effector protein linked to a complementary portion of the reporter wherein activity of the reporter is reconstituted when the first portion and the complementary portion of the reporter are contacted; iii) a first guide that binds to the first Cas12b effector protein and hybridizes to a first target sequence of the oligonucleotide; iv) a second guide that binds to the second Cas12b effector protein and hybridizes to a second target sequence of the oligonucleotide; and v) the reporter, wherein the first portion and a second portion of the reporter are contacted when the oligonucleotide of interest is present in the cell, whereby the activity of the reporter is reconstituted. In some examples, the reporter is a fluorescent protein or a luminescent protein

### Application in Non-Animal Organisms

### Application of C2c1-CRISPR System to Plants and Yeast

[0972] In general, the term “plant” relates to any various photosynthetic, eukaryotic, unicellular or multicellular organism of the kingdom Plantae characteristically growing by cell division, containing chloroplasts, and having cell walls comprised of cellulose. The term plant encompasses monocotyledonous and dicotyledonous plants. Specifically, the plants are intended to comprise without limitation angiosperm and gymnosperm plants such as acacia, alfalfa, amaranth, apple, apricot, artichoke, ash tree, asparagus, avocado, banana, barley, beans, beet, birch, beech, blackberry, blueberry, broccoli, Brussel's sprouts, cabbage, canola, cantaloupe, carrot, cassava, cauliflower, cedar, a cereal, celery, chestnut, cherry, Chinese cabbage, citrus, clementine, clover, coffee, corn, cotton, cowpea, cucumber, cypress, eggplant, elm, endive, eucalyptus, fennel, figs, fir, geranium, grape, grapefruit, groundnuts, ground cherry, gum hemlock, hickory, kale, kiwifruit, kohlrabi, larch, lettuce, leek, lemon, lime, locust, pine, maidenhair, maize, mango, maple, melon, millet, mushroom, mustard, nuts, oak, oats, oil palm, okra, onion, orange, an ornamental plant or flower or tree, papaya, palm, parsley, parsnip, pea, peach, peanut, pear, peat, pepper, persimmon, pigeon pea, pine, pineapple, plantain, plum, pomegranate, potato, pumpkin, radicchio, radish, rapeseed, raspberry, rice, rye, sorghum, safflower, sallow, soybean, spinach, spruce, squash, strawberry, sugar beet, sugarcane, sunflower, sweet potato, sweet corn, tangerine, tea, tobacco, tomato, trees, triticale, turf grasses, turnips, vine, walnut, watercress, watermelon, wheat, yams, yew, and zucchini. The term plant also encompasses Algae, which are mainly photoautotrophs unified primarily by their lack of roots, leaves and other organs that characterize higher plants.

[0973] The methods for genome editing using the C2c1 system as described herein can be used to confer desired traits on essentially any plant. A wide variety of plants and plant cell systems may be engineered for the desired physiological and agronomic characteristics described herein using the nucleic acid constructs of the present disclosure and the various transformation methods mentioned above. In preferred embodiments, target plants and plant cells for engineering include, but are not limited to, those monocotyledonous and dicotyledonous plants, such as crops including grain crops (e.g., wheat, maize, rice, millet, barley), fruit crops (e.g., tomato, apple, pear, strawberry, orange), forage crops (e.g., alfalfa), root vegetable crops (e.g., carrot, potato, sugar beets, yam), leafy vegetable crops (e.g., lettuce, spinach); flowering plants (e.g., petunia, rose, chrysanthemum), conifers and pine trees (e.g., pine fir, spruce); plants used in phytoremediation (e.g., heavy metal accumulating plants); oil crops (e.g., sunflower, rape seed) and plants used for experimental purposes (e.g., Arabidopsis). Thus, the methods and CRISPR-Cas systems can be used over a broad range of plants, such as for example with dicotyledonous plants belonging to the orders Magniolales, Illiciales, Laurales, Piperales, Aristochiales, Nymphaeales, Ranunculales, Papeverales, Sarraceniaceae, Trochodendrales, Hamamelidales, Eucomiales, Leitneriales, Myricales, Fagales, Casuarinales, Caryophyllales, Batales, Polygonales, Plumbaginales, Dilleniales, Theales, Malvales, Urticales, Lecythidales, Violales, Salicales, Capparales, Ericales, Diapensales, Ebenales, Primulales, Rosales, Fabales, Podostemales, Haloragales, Myrtales, Cornales, Proteales, San tales, Rafflesiales, Celastrales, Euphorbiales, Rhamnales, Sapindales, Juglandales, Geraniales, Polygalales, Umbellales, Gentianales, Polemoniales, Lamiales, Plantaginales, Scrophulariales, Campanulales, Rubiales, Dipsacales, and Asterales; the methods and CRISPR-Cas systems can be used with monocotyledonous plants such as those belonging to the orders Alismatales, Hydrocharitales, Najadales, Triuridales, Commelinales, Eriocaulales, Restionales, Poales, Juncales, Cyperales, Typhales, Bromeliales, Zingiberales, Arecales, Cyclanthales, Pandanales, Arales, Lilliales, and Orchid ales, or with plants belonging to Gymnospermae, e.g those belonging to the orders Pinales, Ginkgoales, Cycadales, Araucariales, Cupressales and Gnetales.

[0974] The CRISPR-C2c1 systems and methods of use described herein can be used over a broad range of plant species, included in the non-limitative list of dicot, monocot or gymnosperm genera hereunder: Atropa, Alseodaphne, Anacardium, Arachis, Beilschmiedia, Brassica, Carthamus, Cocculus, Croton, Cucumis, Citrus, Citrullus, Capsicum, Catharanthus, Cocos, Coffea, Cucurbita, Daucus, Duguetia, Eschscholzia, Ficus, Fragaria, Glaucium, Glycine, Gossypium, Helianthus, Hevea, Hyoscyamus, Lactuca, Landolphia, Linum, Litsea, Lycopersicon, Lupinus, Manihot, Majorana, Malus, Medicago, Nicotiana, Olea, Parthenium, Papaver, Persea, Phaseolus, Pistacia, Pisum, Pyrus, Prunus, Raphanus, Ricinus, Senecio, Sinomenium, Stephania, Sinapis, Solanum, Theobroma, Trifolium, Trigonella, Vicia, Vinca, Vilis, and Vigna; and the genera Allium, Andropogon, Aragrostis, Asparagus, Avena, Cynodon, Elaeis, Festuca, Festulolium, Heterocallis, Hordeum, Lemna, Lolium, Musa, Oryza, Panicum, Pannesetum, Phleum, Poa, Secale, Sorghum, Triticum, Zea, Abies, Cunninghamia, Ephedra, Picea, Pinus, and Pseudotsuga.

[0975] The CRISPR-C2c1 systems and methods of use can also be used over a broad range of “algae” or “algae cells”; including for example algea selected from several eukaryotic phyla, including the Rhodophyta (red algae), Chlorophyta (green algae), Phaeophyta (brown algae), Bacillariophyta (diatoms), Eustigmatophyta and dinoflagellates as well as the prokaryotic phylum Cyanobacteria (blue-green algae). The term “algae” includes for example algae selected from: Amphora, Anabaena, Anikstrodesmis, Botryococcus, Chaetoceros, Chlamydomonas, Chlorella, Chlorococcum, Cyclotella, Cylindrotheca, Dunaliella, Emiliana, Euglena, Hematococcus, Isochrysis, Monochrysis, Monoraphidium, Nannochloris, Nannnochloropsis, Navicula, Nephrochloris, Nephroselmis, Nitzschia, Nodularia, Nostoc, Oochromonas, Oocystis, Oscillartoria, Pavlova, Phaeodactylum, Playtmonas, Pleurochrysis, Porhyra, Pseudoanabaena, Pyramimonas, Stichococcus, Synechococcus, Synechocystis, Tetraselmis, Thalassiosira, and Trichodesmium.

[0976] A part of a plant, i.e., a “plant tissue” may be treated according to the methods of the present invention to produce an improved plant. Plant tissue also encompasses plant cells. The term “plant cell” as used herein refers to individual units of a living plant, either in an intact whole plant or in an isolated form grown in in vitro tissue cultures, on media or agar, in suspension in a growth media or buffer or as a part of higher organized unites, such as, for example, plant tissue, a plant organ, or a whole plant.

[0977] A “protoplast” refers to a plant cell that has had its protective cell wall completely or partially removed using, for example, mechanical or enzymatic means resulting in an intact biochemical competent unit of living plant that can reform their cell wall, proliferate and regenerate grow into a whole plant under proper growing conditions.

[0978] The term “transformation” broadly refers to the process by which a plant host is genetically modified by the introduction of DNA by means of Agrobacteria or one of a variety of chemical or physical methods. As used herein, the term “plant host” refers to plants, including any cells, tissues, organs, or progeny of the plants. Many suitable plant tissues or plant cells can be transformed and include, but are not limited to, protoplasts, somatic embryos, pollen, leaves, seedlings, stems, calli, stolons, microtubers, and shoots. A plant tissue also refers to any clone of such a plant, seed, progeny, propagule whether generated sexually or asexually, and descendants of any of these, such as cuttings or seed.

[0979] The term “transformed” as used herein, refers to a cell, tissue, organ, or organism into which a foreign DNA molecule, such as a construct, has been introduced. The introduced DNA molecule may be integrated into the genomic DNA of the recipient cell, tissue, organ, or organism such that the introduced DNA molecule is transmitted to the subsequent progeny. In these embodiments, the “transformed” or “transgenic” cell or plant may also include progeny of the cell or plant and progeny produced from a breeding program employing such a transformed plant as a parent in a cross and exhibiting an altered phenotype resulting from the presence of the introduced DNA molecule. Preferably, the transgenic plant is fertile and capable of transmitting the introduced DNA to progeny through sexual reproduction.

[0980] The term “progeny”, such as the progeny of a transgenic plant, is one that is born of, begotten by, or derived from a plant or the transgenic plant. The introduced DNA molecule may also be transiently introduced into the recipient cell such that the introduced DNA molecule is not inherited by subsequent progeny and thus not considered “transgenic”. Accordingly, as used herein, a “non-transgenic” plant or plant cell is a plant which does not contain a foreign DNA stably integrated into its genome.

[0981] The term “plant promoter” as used herein is a promoter capable of initiating transcription in plant cells, whether or not its origin is a plant cell. Exemplary suitable plant promoters include, but are not limited to, those that are obtained from plants, plant viruses, and bacteria such as Agrobacterium or Rhizobium which comprise genes expressed in plant cells.

[0982] As used herein, a “fungal cell” refers to any type of eukaryotic cell within the kingdom of fungi. Phyla within the kingdom of fungi include Ascomycota, Basidiomycota, Blastocladiomycota, Chytridiomycota, Glomeromycota, Microsporidia, and Neocallimastigomycota. Fungal cells may include yeasts, molds, and filamentous fungi. In some embodiments, the fungal cell is a yeast cell.

[0983] As used herein, the term “yeast cell” refers to any fungal cell within the phyla Ascomycota and Basidiomycota. Yeast cells may include budding yeast cells, fission yeast cells, and mold cells. Without being limited to these organisms, many types of yeast used in laboratory and industrial settings are part of the phylum Ascomycota. In some embodiments, the yeast cell is an S. cerervisiae, Kluyveromyces marxianus, or Issatchenkia orientalis cell. Other yeast cells may include without limitation Candida spp. (e.g., Candida albicans), Yarrowia spp. (e.g., Yarrowia lipolytica), Pichia spp. (e.g., Pichia pastoris), Kluyveromyces spp. (e.g., Kluyveromyces lactis and Kluyveromyces marxianus), Neurospora spp. (e.g., Neurospora crassa), Fusarium spp. (e.g., Fusarium oxysporum), and Issatchenkia spp. (e.g., Issatchenkia orientalis, a.k.a. Pichia kudriavzevii and Candida acidothermophilum). In some embodiments, the fungal cell is a filamentous fungal cell. As used herein, the term “filamentous fungal cell” refers to any type of fungal cell that grows in filaments, i.e., hyphae or mycelia. Examples of filamentous fungal cells may include without limitation Aspergillus spp. (e.g., Aspergillus niger), Trichoderma spp. (e.g., Trichoderma reesei), Rhizopus spp. (e.g., Rhizopus oryzae), and Mortierella spp. (e.g., Mortierella isabellina).

[0984] In some embodiments, the fungal cell is an industrial strain. As used herein, “industrial strain” refers to any strain of fungal cell used in or isolated from an industrial process, e.g., production of a product on a commercial or industrial scale. Industrial strain may refer to a fungal species that is typically used in an industrial process, or it may refer to an isolate of a fungal species that may be also used for non-industrial purposes (e.g., laboratory research). Examples of industrial processes may include fermentation (e.g., in production of food or beverage products), distillation, biofuel production, production of a compound, and production of a polypeptide. Examples of industrial strains may include, without limitation, JAY270 and ATCC4124.

[0985] In some embodiments, the fungal cell is a polyploid cell. As used herein, a “polyploid” cell may refer to any cell whose genome is present in more than one copy. A polyploid cell may refer to a type of cell that is naturally found in a polyploid state, or it may refer to a cell that has been induced to exist in a polyploid state (e.g., through specific regulation, alteration, inactivation, activation, or modification of meiosis, cytokinesis, or DNA replication). A polyploid cell may refer to a cell whose entire genome is polyploid, or it may refer to a cell that is polyploid in a particular genomic locus of interest. Without wishing to be bound to theory, it is thought that the abundance of guide RNA may more often be a rate-limiting component in genome engineering of polyploid cells than in haploid cells, and thus the methods using the C2c1 CRISPRS system described herein may take advantage of using a certain fungal cell type.

[0986] In some embodiments, the fungal cell is a diploid cell. As used herein, a “diploid” cell may refer to any cell whose genome is present in two copies. A diploid cell may refer to a type of cell that is naturally found in a diploid state, or it may refer to a cell that has been induced to exist in a diploid state (e.g., through specific regulation, alteration, inactivation, activation, or modification of meiosis, cytokinesis, or DNA replication). For example, the S. cerevisiae strain S228C may be maintained in a haploid or diploid state. A diploid cell may refer to a cell whose entire genome is diploid, or it may refer to a cell that is diploid in a particular genomic locus of interest. In some embodiments, the fungal cell is a haploid cell. As used herein, a “haploid” cell may refer to any cell whose genome is present in one copy. A haploid cell may refer to a type of cell that is naturally found in a haploid state, or it may refer to a cell that has been induced to exist in a haploid state (e.g., through specific regulation, alteration, inactivation, activation, or modification of meiosis, cytokinesis, or DNA replication). For example, the S. cerevisiae strain S228C may be maintained in a haploid or diploid state. A haploid cell may refer to a cell whose entire genome is haploid, or it may refer to a cell that is haploid in a particular genomic locus of interest.

[0987] As used herein, a “yeast expression vector” refers to a nucleic acid that contains one or more sequences encoding an RNA and/or polypeptide and may further contain any desired elements that control the expression of the nucleic acid(s), as well as any elements that enable the replication and maintenance of the expression vector inside the yeast cell. Many suitable yeast expression vectors and features thereof are known in the art; for example, various vectors and techniques are illustrated in in Yeast Protocols, 2nd edition, Xiao, W., ed. (Humana Press, New York, 2007) and Buckholz, R. G. and Gleeson, M. A. (1991) Biotechnology (NY) 9(11): 1067-72. Yeast vectors may contain, without limitation, a centromeric (CEN) sequence, an autonomous replication sequence (ARS), a promoter, such as an RNA Polymerase III promoter, operably linked to a sequence or gene of interest, a terminator such as an RNA polymerase III terminator, an origin of replication, and a marker gene (e.g., auxotrophic, antibiotic, or other selectable markers). Examples of expression vectors for use in yeast may include plasmids, yeast artificial chromosomes, 2 plasmids, yeast integrative plasmids, yeast replicative plasmids, shuttle vectors, and episomal plasmids.

### Stable Integration of CRISPR-C2c1 System Components in the Genome of Plants and Plant Cells

[0988] In particular embodiments, it is envisaged that the polynucleotides encoding the components of the CRISPR-C2c1 system are introduced for stable integration into the genome of a plant cell. In these embodiments, the design of the transformation vector or the expression system can be adjusted depending on for when, where and under what conditions the guide RNA and/or the C2c1 gene are expressed.

[0989] In particular embodiments, it is envisaged to introduce the components of the CRISPR-C2c1 system stably into the genomic DNA of a plant cell. Additionally or alternatively, it is envisaged to introduce the components of the CRISPR-C2c1 system for stable integration into the DNA of a plant organelle such as, but not limited to a plastid, e mitochondrion or a chloroplast.

[0990] The expression system for stable integration into the genome of a plant cell may contain one or more of the following elements: a promoter element that can be used to express the RNA and/or C2c1 enzyme in a plant cell; a 5′ untranslated region to enhance expression; an intron element to further enhance expression in certain cells, such as monocot cells; a multiple-cloning site to provide convenient restriction sites for inserting the guide RNA and/or the C2c1 gene sequences and other desired elements; and a 3′ untranslated region to provide for efficient termination of the expressed transcript.

[0991] The elements of the expression system may be on one or more expression constructs which are either circular such as a plasmid or transformation vector, or non-circular such as linear double stranded DNA.

[0992] In a particular embodiment, a C2c1 CRISPR expression system comprises at least:
[0993] (a) a nucleotide sequence encoding a guide RNA (gRNA) that hybridizes with a target sequence in a plant, and wherein the guide RNA comprises a guide sequence and a direct repeat sequence,
[0994] (b) a nucleotide sequence encoding a tracr RNA, and
[0995] (c) a nucleotide sequence encoding a C2c1 protein,

[0996] wherein components (a) or (b) or (c) are located on the same or on different constructs, and whereby the different nucleotide sequences can be under control of the same or a different regulatory element operable in a plant cell. The tracr may be fused to the guide RNA.

[0997] DNA construct(s) containing the components of the CRISPR-C2c1 system, and, where applicable, template sequence may be introduced into the genome of a plant, plant part, or plant cell by a variety of conventional techniques. The process generally comprises the steps of selecting a suitable host cell or host tissue, introducing the construct(s) into the host cell or host tissue, and regenerating plant cells or plants therefrom.

[0998] In particular embodiments, the DNA construct may be introduced into the plant cell using techniques such as but not limited to electroporation, microinjection, aerosol beam injection of plant cell protoplasts, or the DNA constructs can be introduced directly to plant tissue using biolistic methods, such as DNA particle bombardment (see also Fu et al., Transgenic Res. 2000 February; 9(1):11-9). The basis of particle bombardment is the acceleration of particles coated with gene/s of interest toward cells, resulting in the penetration of the protoplasm by the particles and typically stable integration into the genome. (see e.g. Klein et al, Nature (1987), Klein et ah, Bio/Technology (1992), Casas et ah, Proc. Natl. Acad. Sci. USA (1993).).

[0999] In particular embodiments, the DNA constructs containing components of the CRISPR-C2c1 system may be introduced into the plant by Agrobacterium-mediated transformation. The DNA constructs may be combined with suitable T-DNA flanking regions and introduced into a conventional Agrobacterium tumefaciens host vector. The foreign DNA can be incorporated into the genome of plants by infecting the plants or by incubating plant protoplasts with Agrobacterium bacteria, containing one or more Ti (tumor-inducing) plasmids. (see e.g. Fraley et al., (1985), Rogers et al., (1987) and U.S. Pat. No. 5,563,055).

### Plant Promoters

[1000] In order to ensure appropriate expression in a plant cell, the components of the CRISPR-C2c1 system described herein are typically placed under control of a plant promoter, i.e. a promoter operable in plant cells. The use of different types of promoters is envisaged.

[1001] A constitutive plant promoter is a promoter that is able to express the open reading frame (ORF) that it controls in all or nearly all of the plant tissues during all or nearly all developmental stages of the plant (referred to as “constitutive expression”). One non-limiting example of a constitutive promoter is the cauliflower mosaic virus 35S promoter. “Regulated promoter” refers to promoters that direct gene expression not constitutively, but in a temporally- and/or spatially-regulated manner, and includes tissue-specific, tissue-preferred and inducible promoters. Different promoters may direct the expression of a gene in different tissues or cell types, or at different stages of development, or in response to different environmental conditions. In particular embodiments, one or more of the C2c1 CRISPR components are expressed under the control of a constitutive promoter, such as the cauliflower mosaic virus 35S promoter issue-preferred promoters can be utilized to target enhanced expression in certain cell types within a particular plant tissue, for instance vascular cells in leaves or roots or in specific cells of the seed. Examples of particular promoters for use in the CRISPR-C2c1 system can be found in Kawamata et al., (1997) Plant Cell Physiol 38:792-803; Yamamoto et al., (1997) Plant J 12:255-65; Hire et al, (1992) Plant Mol Biol 20:207-18, Kuster et al, (1995) Plant Mol Biol 29:759-72, and Capana et al., (1994) Plant Mol Biol 25:681-91.

[1002] Examples of promoters that are inducible and that allow for spatiotemporal control of gene editing or gene expression may use a form of energy. The form of energy may include but is not limited to sound energy, electromagnetic radiation, chemical energy and/or thermal energy. Examples of inducible systems include tetracycline inducible promoters (Tet-On or Tet-Off), small molecule two-hybrid transcription activations systems (FKBP, ABA, etc), or light inducible systems (Phytochrome, LOV domains, or cryptochrome), such as a Light Inducible Transcriptional Effector (LITE) that direct changes in transcriptional activity in a sequence-specific manner. The components of a light inducible system may include a C2c1 CRISPR enzyme, a light-responsive cytochrome heterodimer (e.g. from Arabidopsis thaliana), and a transcriptional activation/repression domain. Further examples of inducible DNA binding proteins and methods for their use are provided in U.S. 61/736,465 and U.S. 61/721,283, which is hereby incorporated by reference in its entirety.

[1003] In particular embodiments, transient or inducible expression can be achieved by using, for example, chemical-regulated promotors, i.e. whereby the application of an exogenous chemical induces gene expression. Modulating of gene expression can also be obtained by a chemical-repressible promoter, where application of the chemical represses gene expression. Chemical-inducible promoters include, but are not limited to, the maize ln2-2 promoter, activated by benzene sulfonamide herbicide safeners (De Veylder et al., (1997) Plant Cell Physiol 38:568-77), the maize GST promoter (GST-ll-27, WO93/01294), activated by hydrophobic electrophilic compounds used as pre-emergent herbicides, and the tobacco PR-1 a promoter (Ono et al., (2004) Biosci Biotechnol Biochem 68:803-7) activated by salicylic acid. Promoters which are regulated by antibiotics, such as tetracycline-inducible and tetracycline-repressible promoters (Gatz et al., (1991) Mol Gen Genet 227:229-37; U.S. Pat. Nos. 5,814,618 and 5,789,156) can also be used herein.

Translocation to and/or Expression in Specific Plant Organelles

[1004] The expression system may comprise elements for translocation to and/or expression in a specific plant organelle.

[1005] Chloroplast targeting. In particular embodiments, it is envisaged that the CRISPR-C2c1 system is used to specifically modify chloroplast genes or to ensure expression in the chloroplast. For this purpose use is made of chloroplast transformation methods or compartmentalization of the C2c1 CRISPR components to the chloroplast. For instance, the introduction of genetic modifications in the plastid genome can reduce biosafety issues such as gene flow through pollen.

[1006] Methods of chloroplast transformation are known in the art and include Particle bombardment, PEG treatment, and microinjection. Additionally, methods involving the translocation of transformation cassettes from the nuclear genome to the pastid can be used as described in WO2010061186.

[1007] Alternatively, it is envisaged to target one or more of the C2c1 CRISPR components to the plant chloroplast. This is achieved by incorporating in the expression construct a sequence encoding a chloroplast transit peptide (CTP) or plastid transit peptide, operably linked to the 5′ region of the sequence encoding the C2c1 protein. The CTP is removed in a processing step during translocation into the chloroplast. Chloroplast targeting of expressed proteins is well known to the skilled artisan (see for instance Protein Transport into Chloroplasts, 2010, Annual Review of Plant Biology, Vol. 61: 157-180). In such embodiments it is also desired to target the guide RNA to the plant chloroplast. Methods and constructs which can be used for translocating guide RNA into the chloroplast by means of a chloroplast localization sequence are described, for instance, in US 20040142476, incorporated herein by reference. Such variations of constructs can be incorporated into the expression systems of the invention to efficiently translocate the C2c1-guide RNA.

### Introduction of Polynucleotides Encoding the CRISPR-C2c1 System in Algal Cells.

[1008] Transgenic algae (or other plants such as rape) may be particularly useful in the production of vegetable oils or biofuels such as alcohols (especially methanol and ethanol) or other products. These may be engineered to express or overexpress high levels of oil or alcohols for use in the oil or biofuel industries.

[1009] U.S. Pat. No. 8,945,839 describes a method for engineering Micro-Algae (Chlamydomonas reinhardtii cells) species) using Cas9. Using similar tools, the methods of the CRISPR-C2c1 system described herein can be applied on Chlamydomonas species and other algae. In particular embodiments, C2c1 and guide RNA are introduced in algae expressed using a vector that expresses C2c1 under the control of a constitutive promoter such as Hsp70A-Rbc S2 or Beta2-tubulin. Guide RNA is optionally delivered using a vector containing T7 promoter. Alternatively, C2c1 mRNA and in vitro transcribed guide RNA can be delivered to algal cells. Electroporation protocols are available to the skilled person such as the standard recommended protocol from the GeneArt Chlamydomonas Engineering kit.

[1010] In particular embodiments, the endonuclease used herein is a Split C2c1 enzyme. Split C2c1 enzymes are preferentially used in Algae for targeted genome modification as has been described for Cas9 in WO 2015086795. Use of the C2c1 split system is particularly suitable for an inducible method of genome targeting and avoids the potential toxic effect of the C2c1 overexpression within the algae cell. In particular embodiments, said C2c1 split domains (RuvC domain) can be simultaneously or sequentially introduced into the cell such that said split C2c1 domain(s) process the target nucleic acid sequence in the algae cell. The reduced size of the split C2c1 compared to the wild type C2c1 allows other methods of delivery of the CRISPR system to the cells, such as the use of Cell Penetrating Peptides as described herein. This method is of particular interest for generating genetically modified algae.

### Introduction of Polynucleotides Encoding C2c1 Components in Yeast Cells

[1011] In particular embodiments, the invention relates to the use of the CRISPR-C2c1 system for genome editing of yeast cells. Methods for transforming yeast cells which can be used to introduce polynucleotides encoding the CRISPR-C2c1 system components are well known to the artisan and are reviewed by Kawai et al., 2010, Bioeng Bugs. 2010 November-December; 1(6): 395-403). Non-limiting examples include transformation of yeast cells by lithium acetate treatment (which may further include carrier DNA and PEG treatment), bombardment or by electroporation.

### Transient Expression of C2c1 CRISP System Components in Plants and Plant Cell

[1012] In particular embodiments, it is envisaged that the guide RNA and/or C2c1 gene are transiently expressed in the plant cell. In these embodiments, the CRISPR-C2c1 system can ensure modification of a target gene only when both the guide RNA and the C2c1 protein is present in a cell, such that genomic modification can further be controlled. As the expression of the C2c1 enzyme is transient, plants regenerated from such plant cells typically contain no foreign DNA. In particular embodiments the C2c1 enzyme is stably expressed by the plant cell and the guide sequence is transiently expressed.

[1013] In particular embodiments, the CRISPR-C2c1 system components can be introduced in the plant cells using a plant viral vector (Scholthof et al. 1996, Annu Rev Phytopathol. 1996; 34:299-323). In further particular embodiments, said viral vector is a vector from a DNA virus. For example, geminivirus (e.g., cabbage leaf curl virus, bean yellow dwarf virus, wheat dwarf virus, tomato leaf curl virus, maize streak virus, tobacco leaf curl virus, or tomato golden mosaic virus) or nanovirus (e.g., Faba bean necrotic yellow virus). In other particular embodiments, said viral vector is a vector from an RNA virus. For example, tobravirus (e.g., tobacco rattle virus, tobacco mosaic virus), potexvirus (e.g., potato virus X), or hordeivirus (e.g., barley stripe mosaic virus). The replicating genomes of plant viruses are non-integrative vectors.

[1014] In particular embodiments, the vector used for transient expression of C2c1 CRISPR constructs is for instance a pEAQ vector, which is tailored for Agrobacterium-mediated transient expression (Sainsbury F. et al., Plant Biotechnol J. 2009 September; 7(7):682-93) in the protoplast. Precise targeting of genomic locations was demonstrated using a modified Cabbage Leaf Curl virus (CaLCuV) vector to express gRNAs in stable transgenic plants expressing a CRISPR enzyme (Scientific Reports 5, Article number: 14926 (2015), doi:10.1038/srep14926).

[1015] In particular embodiments, double-stranded DNA fragments encoding the guide RNA and/or the C2c1 gene can be transiently introduced into the plant cell. In such embodiments, the introduced double-stranded DNA fragments are provided in sufficient quantity to modify the cell but do not persist after a contemplated period of time has passed or after one or more cell divisions. Methods for direct DNA transfer in plants are known by the skilled artisan (see for instance Davey et al. Plant Mol Biol. 1989 September; 13(3):273-85.)

[1016] In other embodiments, an RNA polynucleotide encoding the C2c1 protein is introduced into the plant cell, which is then translated and processed by the host cell generating the protein in sufficient quantity to modify the cell (in the presence of at least one guide RNA) but which does not persist after a contemplated period of time has passed or after one or more cell divisions. Methods for introducing mRNA to plant protoplasts for transient expression are known by the skilled artisan (see for instance in Gallie, Plant Cell Reports (1993), 13; 119-122).

[1017] Combinations of the different methods described above are also envisaged.

### Delivery of C2c1 CRISPR Components to the Plant Cell

[1018] In particular embodiments, it is of interest to deliver one or more components of the CRISPR-C2c1 system directly to the plant cell. This is of interest, inter alia, for the generation of non-transgenic plants (see below). In particular embodiments, one or more of the C2c1 components is prepared outside the plant or plant cell and delivered to the cell. For instance in particular embodiments, the C2c1 protein is prepared in vitro prior to introduction to the plant cell. C2c1 protein can be prepared by various methods known by one of skill in the art and include recombinant production. After expression, the C2c1 protein is isolated, refolded if needed, purified and optionally treated to remove any purification tags, such as a His-tag. Once crude, partially purified, or more completely purified C2c1 protein is obtained, the protein may be introduced to the plant cell.

[1019] In particular embodiments, the C2c1 protein is mixed with guide RNA targeting the gene of interest to form a pre-assembled ribonucleoprotein.

[1020] The individual components or pre-assembled ribonucleoprotein can be introduced into the plant cell via electroporation, by bombardment with C2c1-associated gene product coated particles, by chemical transfection or by some other means of transport across a cell membrane. For instance, transfection of a plant protoplast with a pre-assembled CRISPR ribonucleoprotein has been demonstrated to ensure targeted modification of the plant genome (as described by Woo et al. Nature Biotechnology, 2015; DOI. 10.1038/nbt.3389).

[1021] In particular embodiments, the CRISPR-C2c1 system components are introduced into the plant cells using particles. The components, either as protein or nucleic acid or in a combination thereof, can be uploaded onto or packaged in particles and applied to the plants (such as for instance described in WO 2008042156 and US 20130185823). In particular, embodiments of the invention comprise particles uploaded with or packed with DNA molecule(s) encoding the C2c1 protein, DNA molecules encoding the guide RNA and/or isolated guide RNA as described in WO2015089419.

[1022] Further means of introducing one or more components of the CRISPR-C2c1 system to the plant cell is by using cell penetrating peptides (CPP). Accordingly, in particular, embodiments the invention comprises compositions comprising a cell penetrating peptide linked to the C2c1 protein. In particular embodiments of the present invention, the C2c1 protein and/or guide RNA is coupled to one or more CPPs to effectively transport them inside plant protoplasts; see also Ramakrishna (20140 Genome Res. 2014 June; 24(6):1020-7 for Cas9 in human cells). In other embodiments, the C2c1 gene and/or guide RNA are encoded by one or more circular or non-circular DNA molecule(s) which are coupled to one or more CPPs for plant protoplast delivery. The plant protoplasts are then regenerated to plant cells and further to plants. CPPs are generally described as short peptides of fewer than 35 amino acids either derived from proteins or from chimeric sequences which are capable of transporting biomolecules across cell membrane in a receptor independent manner. CPP can be cationic peptides, peptides having hydrophobic sequences, amphipathic peptides, peptides having proline-rich and anti-microbial sequence, and chimeric or bipartite peptides (Pooga and Langel 2005). CPPs are able to penetrate biological membranes and as such trigger the movement of various biomolecules across cell membranes into the cytoplasm and to improve their intracellular routing, and hence facilitate interaction of the biomolecule with the target. Examples of CPP include amongst others: Tat, a nuclear transcriptional activator protein required for viral replication by HIV typel, penetratin, Kaposi fibroblast growth factor (FGF) signal peptide sequence, integrin p3 signal peptide sequence; polyarginine peptide Args sequence, Guanine rich-molecular transporters, sweet arrow peptide, etc.

### Use of the CRISPR-C2c1 System to Make Genetically Modified Non-Transgenic Plants

[1023] In particular embodiments, the methods described herein are used to modify endogenous genes or to modify their expression without the permanent introduction into the genome of the plant of any foreign gene, including those encoding CRISPR components, so as to avoid the presence of foreign DNA in the genome of the plant. This can be of interest as the regulatory requirements for non-transgenic plants are less rigorous.

[1024] In particular embodiments, this is ensured by transient expression of the C2c1 CRISPR components. In particular embodiments one or more of the CRISPR components are expressed on one or more viral vectors which produce sufficient C2c1 protein and guide RNA to consistently steadily ensure modification of a gene of interest according to a method described herein.

[1025] In particular embodiments, transient expression of C2c1 CRISPR constructs is ensured in plant protoplasts and thus not integrated into the genome. The limited window of expression can be sufficient to allow the CRISPR-C2c1 system to ensure modification of a target gene as described herein.

[1026] In particular embodiments, the different components of the CRISPR-C2c1 system are introduced in the plant cell, protoplast or plant tissue either separately or in mixture, with the aid of particulate delivering molecules such as particles or CPP molecules as described herein above.

[1027] The expression of the C2c1 CRISPR components can induce targeted modification of the genome, either by direct activity of the C2c1 nuclease and optionally introduction of template DNA or by modification of genes targeted using the CRISPR-C2c1 system as described herein. The different strategies described herein above allow C2c1-mediated targeted genome editing without requiring the introduction of the C2c1 CRISPR components into the plant genome. Components which are transiently introduced into the plant cell are typically removed upon crossing.

### Detecting Modifications in the Plant Genome-Selectable Markers

[1028] In particular embodiments, where the method involves modification of an endogenous target gene of the plant genome, any suitable method can be used to determine, after the plant, plant part or plant cell is infected or transfected with the CRISPR-C2c1 system, whether gene targeting or targeted mutagenesis has occurred at the target site. Where the method involves introduction of a transgene, a transformed plant cell, callus, tissue or plant may be identified and isolated by selecting or screening the engineered plant material for the presence of the transgene or for traits encoded by the transgene. Physical and biochemical methods may be used to identify plant or plant cell transformants containing inserted gene constructs or an endogenous DNA modification. These methods include but are not limited to: 1) Southern analysis or PCR amplification for detecting and determining the structure of the recombinant DNA insert or modified endogenous genes; 2) Northern blot, S1 RNase protection, primer-extension or reverse transcriptase-PCR amplification for detecting and examining RNA transcripts of the gene constructs; 3) enzymatic assays for detecting enzyme or ribozyme activity, where such gene products are encoded by the gene construct or expression is affected by the genetic modification; 4) protein gel electrophoresis, Western blot techniques, immunoprecipitation, or enzyme-linked immunoassays, where the gene construct or endogenous gene products are proteins. Additional techniques, such as in situ hybridization, enzyme staining, and immunostaining, also may be used to detect the presence or expression of the recombinant construct or detect a modification of endogenous gene in specific plant organs and tissues. The methods for doing all these assays are well known to those skilled in the art.

[1029] Additionally (or alternatively), the expression system encoding the C2c1 CRISPR components is typically designed to comprise one or more selectable or detectable markers that provide a means to isolate or efficiently select cells that contain and/or have been modified by the CRISPR-C2c1 system at an early stage and on a large scale.

[1030] In the case of Agrobacterium-mediated transformation, the marker cassette may be adjacent to or between flanking T-DNA borders and contained within a binary vector. In another embodiment, the marker cassette may be outside of the T-DNA. A selectable marker cassette may also be within or adjacent to the same T-DNA borders as the expression cassette or may be somewhere else within a second T-DNA on the binary vector (e.g., a 2 T-DNA system).

[1031] For particle bombardment or with protoplast transformation, the expression system can comprise one or more isolated linear fragments or may be part of a larger construct that might contain bacterial replication elements, bacterial selectable markers or other detectable elements. The expression cassette(s) comprising the polynucleotides encoding the guide and/or C2c1 may be physically linked to a marker cassette or may be mixed with a second nucleic acid molecule encoding a marker cassette. The marker cassette is comprised of necessary elements to express a detectable or selectable marker that allows for efficient selection of transformed cells.

[1032] The selection procedure for the cells based on the selectable marker will depend on the nature of the marker gene. In particular embodiments, use is made of a selectable marker, i.e. a marker which allows a direct selection of the cells based on the expression of the marker. A selectable marker can confer positive or negative selection and is conditional or non-conditional on the presence of external substrates (Miki et al. 2004, 107(3): 193-232). Most commonly, antibiotic or herbicide resistance genes are used as a marker, whereby selection is be performed by growing the engineered plant material on media containing an inhibitory amount of the antibiotic or herbicide to which the marker gene confers resistance. Examples of such genes are genes that confer resistance to antibiotics, such as hygromycin (hpt) and kanamycin (nptII), and genes that confer resistance to herbicides, such as phosphinothricin (bar) and chlorosulfuron (als),

[1033] Transformed plants and plant cells may also be identified by screening for the activities of a visible marker, typically an enzyme capable of processing a colored substrate (e.g., the 0-glucuronidase, luciferase, B or C1 genes). Such selection and screening methodologies are well known to those skilled in the art.

### Plant Cultures and Regeneration

[1034] In particular embodiments, plant cells which have a modified genome and that are produced or obtained by any of the methods described herein, can be cultured to regenerate a whole plant which possesses the transformed or modified genotype and thus the desired phenotype. Conventional regeneration techniques are well known to those skilled in the art. Particular examples of such regeneration techniques rely on manipulation of certain phytohormones in a tissue culture growth medium, and typically relying on a biocide and/or herbicide marker which has been introduced together with the desired nucleotide sequences. In further particular embodiments, plant regeneration is obtained from cultured protoplasts, plant callus, explants, organs, pollens, embryos or parts thereof (see e.g. Evans et al. (1983), Handbook of Plant Cell Culture, Klee et al (1987) Ann. Rev. of Plant Phys.).

[1035] In particular embodiments, transformed or improved plants as described herein can be self-pollinated to provide seed for homozygous improved plants of the invention (homozygous for the DNA modification) or crossed with non-transgenic plants or different improved plants to provide seed for heterozygous plants. Where a recombinant DNA was introduced into the plant cell, the resulting plant of such a crossing is a plant which is heterozygous for the recombinant DNA molecule. Both such homozygous and heterozygous plants obtained by crossing from the improved plants and comprising the genetic modification (which can be a recombinant DNA) are referred to herein as “progeny”. Progeny plants are plants descended from the original transgenic plant and containing the genome modification or recombinant DNA molecule introduced by the methods provided herein. Alternatively, genetically modified plants can be obtained by one of the methods described supra using the Cfp1 enzyme whereby no foreign DNA is incorporated into the genome. Progeny of such plants, obtained by further breeding may also contain the genetic modification. Breedings are performed by any breeding methods that are commonly used for different crops (e.g., Allard, Principles of Plant Breeding, John Wiley & Sons, NY, U. of CA, Davis, Calif., 50-98 (1960).

Generation of Plants with Enhanced Agronomic Traits

[1036] The C2c1 based CRISPR systems provided herein can be used to introduce targeted double-strand or single-strand breaks and/or to introduce gene activator and or repressor systems and without being limitative, can be used for gene targeting, gene replacement, targeted mutagenesis, targeted deletions or insertions, targeted inversions and/or targeted translocations. By co-expression of multiple targeting RNAs directed to achieve multiple modifications in a single cell, multiplexed genome modification can be ensured. This technology can be used to high-precision engineering of plants with improved characteristics, including enhanced nutritional quality, increased resistance to diseases and resistance to biotic and abiotic stress, and increased production of commercially valuable plant products or heterologous compounds.

[1037] In particular embodiments, the CRISPR-C2c1 system as described herein is used to introduce targeted double-strand breaks (DSB) in an endogenous DNA sequence. The DSB activates cellular DNA repair pathways, which can be harnessed to achieve desired DNA sequence modifications near the break site. This is of interest where the inactivation or modification of endogenous genes can confer or contribute to a desired trait. In some embodiments, homologous recombination (HR) with a template sequence is promoted at the site of the DSB, in order to introduce a gene of interest. In some embodiments, HR-independent recombination is promoted at the site of DSB in order to introduce a sequence or gene of interest at the staggered DSB. In particular embodiments, the CRISPR-C2c1 system generates staggered DSBs with 5′ overhangs. In certain particular embodiments, the CRISPR-C2c1 system comprises insert template sequence in the guide sequence and introduces specific DNA inserts at the staggered DSBs.

[1038] In particular embodiments, the CRISPR-C2c1 system may be used as a generic nucleic acid binding protein with fusion to or being operably linked to a functional domain for activation and/or repression of endogenous plant genes. Exemplary functional domains may include but are not limited to RNA or DNA deaminase, translational initiator, translational activator, translational repressor, nucleases, in particular ribonucleases, a spliceosome, beads, a light inducible/controllable domain or a chemically inducible/controllable domain. Typically in these embodiments, the C2c1 protein comprises at least one mutation, such that it has no more than 5% of the activity of the C2c1 protein not having the at least one mutation; the guide RNA comprises a guide sequence capable of hybridizing to a target sequence.

[1039] The methods described herein generally result in the generation of “improved plants” in that they have one or more desirable traits compared to the wildtype plant. In particular embodiments, the plants, plant cells or plant parts obtained are transgenic plants, comprising an exogenous DNA sequence incorporated into the genome of all or part of the cells of the plant. In particular embodiments, non-transgenic genetically modified plants, plant parts or cells are obtained, in that no exogenous DNA sequence is incorporated into the genome of any of the plant cells of the plant. In such embodiments, the improved plants are non-transgenic. Where only the modification of an endogenous gene is ensured and no foreign genes are introduced or maintained in the plant genome, the resulting genetically modified crops contain no foreign genes and can thus basically be considered non-transgenic. The different applications of the CRISPR-C2c1 system for plant genome editing are described more in detail below:

### a) Introduction of One or More Foreign Genes to Confer an Agricultural Trait of Interest

[1040] The invention provides methods of genome editing or modifying sequences associated with or at a target locus of interest wherein the method comprises introducing a C2c1 effector protein complex into a plant cell, whereby the C2c1 effector protein complex effectively functions to integrate a DNA insert, e.g. encoding a foreign gene of interest, into the genome of the plant cell. In some embodiments the integration of the DNA insert is facilitated by HR with an exogenously introduced DNA template or repair template. In some preferred embodiments, the integration of the DNA insert is facilitated by HR-independent integration (e.g. NHEJ). Typically, the exogenously introduced DNA template or repair template is delivered together with the C2c1 effector protein complex or one component or a polynucleotide vector for expression of a component of the complex.

[1041] The CRISPR-C2c1 systems provided herein allow for targeted gene delivery. It has become increasingly clear that the efficiency of expressing a gene of interest is to a great extent determined by the location of integration into the genome. The present methods allow for targeted integration of the foreign gene into a desired location in the genome. The location can be selected based on information of previously generated events or can be selected by methods disclosed elsewhere herein.

[1042] In particular embodiments, the methods provided herein include (a) introducing into the cell a C2c1 CRISPR complex comprising a guide RNA, comprising a direct repeat and a guide sequence, wherein the guide sequence hybridizes to a target sequence that is endogenous to the plant cell; (b) introducing into the plant cell a C2c1 effector molecule which complexes with the guide RNA when the guide sequence hybridizes to the target sequence and induces a double strand break at or near the sequence to which the guide sequence is targeted; and (c) introducing into the cell a nucleotide sequence encoding an HDR repair template which encodes the gene of interest and which is introduced into the location of the DS break as a result of HDR. In particular embodiments, the step of introducing can include delivering to the plant cell one or more polynucleotides encoding C2c1 effector protein, the guide RNA and the repair template. In particular embodiments, the polynucleotides are delivered into the cell by a DNA virus (e.g., a geminivirus) or an RNA virus (e.g., a tobravirus). In particular embodiments, the introducing steps include delivering to the plant cell a T-DNA containing one or more polynucleotide sequences encoding the C2c1 effector protein, the guide RNA and the repair template, where the delivering is via Agrobacterium. The nucleic acid sequence encoding the C2c1 effector protein can be operably linked to a promoter, such as a constitutive promoter (e.g., a cauliflower mosaic virus 35S promoter), or a cell specific or inducible promoter. In particular embodiments, the polynucleotide is introduced by microprojectile bombardment. In particular embodiments, the method further includes screening the plant cell after the introducing steps to determine whether the repair template i.e. the gene of interest has been introduced. In particular embodiments, the methods include the step of regenerating a plant from the plant cell. In further embodiments, the methods include cross breeding the plant to obtain a genetically desired plant lineage. Examples of foreign genes encoding a trait of interest are listed below.

### b) Editing of Endogenous Genes to Confer an Agricultural Trait of Interest

[1043] The invention provides methods of genome editing or modifying sequences associated with or at a target locus of interest wherein the method comprises introducing a C2c1 effector protein complex into a plant cell, whereby the C2c1 complex modifies the expression of an endogenous gene of the plant. This can be achieved in different ways, In particular embodiments, the elimination of expression of an endogenous gene is desirable and the C2c1 CRISPR complex is used to target and cleave an endogenous gene so as to modify gene expression. In these embodiments, the methods provided herein include (a) introducing into the plant cell a C2c1 CRISPR complex comprising a guide RNA, comprising a direct repeat and a guide sequence, wherein the guide sequence hybridizes to a target sequence within a gene of interest in the genome of the plant cell; and (b) introducing into the cell a C2c1 effector protein, which upon binding to the guide RNA comprises a guide sequence that is hybridized to the target sequence, ensures a double strand break at or near the sequence to which the guide sequence is targeted; In particular embodiments, the step of introducing can include delivering to the plant cell one or more polynucleotides encoding C2c1 effector protein and the guide RNA.

[1044] In particular embodiments, the polynucleotides are delivered into the cell by a DNA virus (e.g., a geminivirus) or an RNA virus (e.g., a tobravirus). In particular embodiments, the introducing steps include delivering to the plant cell a T-DNA containing one or more polynucleotide sequences encoding the C2c1 effector protein and the guide RNA, where the delivering is via Agrobacterium. The polynucleotide sequence encoding the components of the CRISPR-C2c1 system can be operably linked to a promoter, such as a constitutive promoter (e.g., a cauliflower mosaic virus 35S promoter), or a cell specific or inducible promoter. In particular embodiments, the polynucleotide is introduced by microprojectile bombardment. In particular embodiments, the method further includes screening the plant cell after the introducing steps to determine whether the expression of the gene of interest has been modified. In particular embodiments, the methods include the step of regenerating a plant from the plant cell. In further embodiments, the methods include cross breeding the plant to obtain a genetically desired plant lineage.

[1045] In particular embodiments of the methods described above, disease resistant crops are obtained by targeted mutation of disease susceptibility genes or genes encoding negative regulators (e.g. Mlo gene) of plant defense genes. In a particular embodiment, herbicide-tolerant crops are generated by targeted substitution of specific nucleotides in plant genes such as those encoding acetolactate synthase (ALS) and protoporphyrinogen oxidase (PPO). In particular embodiments drought and salt tolerant crops by targeted mutation of genes encoding negative regulators of abiotic stress tolerance, low amylose grains by targeted mutation of Waxy gene, rice or other grains with reduced rancidity by targeted mutation of major lipase genes in aleurone layer, etc. In particular embodiments. A more extensive list of endogenous genes encoding a traits of interest are listed below.

### c) Modulating of Endogenous Genes by the CRISPR-C2c1 System to Confer an Agricultural Trait of Interest

[1046] Also provided herein are methods for modulating (i.e. activating or repressing) endogenous gene expression using the C2c1 protein provided herein. Such methods make use of distinct RNA sequence(s) which are targeted to the plant genome by the C2c1 complex. More particularly the distinct RNA sequence(s) bind to two or more adaptor proteins (e.g. aptamers) whereby each adaptor protein is associated with one or more functional domains and wherein at least one of the one or more functional domains associated with the adaptor protein have one or more activities comprising deaminase activity, methylase activity, demethylase activity, transcription activation activity, transcription repression activity, transcription release factor activity, histone modification activity, DNA integration activity RNA cleavage activity, DNA cleavage activity or nucleic acid binding activity; The functional domains are used to modulate expression of an endogenous plant gene so as to obtain the desired trait. Typically, in these embodiments, the C2c1 effector protein has one or more mutations such that it has no more than 5% of the nuclease activity of the C2c1 effector protein not having the at least one mutation.

[1047] In particular embodiments, the methods provided herein include the steps of (a) introducing into the cell a C2c1 CRISPR complex comprising a tracr RNA, a guide RNA, comprising a direct repeat and a guide sequence, wherein the guide sequence hybridizes to a target sequence that is endogenous to the plant cell; (b) introducing into the plant cell a C2c1 effector molecule which complexes with the guide RNA when the guide sequence hybridizes to the target sequence; and wherein either the guide RNA is modified to comprise a distinct RNA sequence (aptamer) binding to a functional domain and/or the C2c1 effector protein is modified in that it is linked to a functional domain. In particular embodiments, the step of introducing can include delivering to the plant cell one or more polynucleotides encoding the (modified) C2c1 effector protein and the (modified) guide RNA. The details the components of the CRISPR-C2c1 system for use in these methods are described elsewhere herein.

[1048] In particular embodiments, the polynucleotides are delivered into the cell by a DNA virus (e.g., a geminivirus) or an RNA virus (e.g., a tobravirus). In particular embodiments, the introducing steps include delivering to the plant cell a T-DNA containing one or more polynucleotide sequences encoding the C2c1 effector protein and the guide RNA, where the delivering is via Agrobacterium. The nucleic acid sequence encoding the one or more components of the CRISPR-C2c1 system can be operably linked to a promoter, such as a constitutive promoter (e.g., a cauliflower mosaic virus 35S promoter), or a cell specific or inducible promoter. In particular embodiments, the polynucleotide is introduced by microprojectile bombardment. In particular embodiments, the method further includes screening the plant cell after the introducing steps to determine whether the expression of the gene of interest has been modified. In particular embodiments, the methods include the step of regenerating a plant from the plant cell. In further embodiments, the methods include cross breeding the plant to obtain a genetically desired plant lineage. A more extensive list of endogenous genes encoding a traits of interest are listed below.

### Use of C2c1 to Modify Polyploid Plants

[1049] Many plants are polyploid, which means they carry duplicate copies of their genomes-sometimes as many as six, as in wheat. The methods according to the present invention, which make use of the C2c1 CRISPR effector protein can be “multiplexed” to affect all copies of a gene, or to target dozens of genes at once. For instance, in particular embodiments, the methods of the present invention are used to simultaneously ensure a loss of function mutation in different genes responsible for suppressing defenses against a disease. In particular embodiments, the methods of the present invention are used to simultaneously suppress the expression of the TaMLO-A1, TaMLO-B1 and TaMLO-D1 nucleic acid sequence in a wheat plant cell and regenerating a wheat plant therefrom, in order to ensure that the wheat plant is resistant to powdery mildew (see also WO2015109752).

### Exemplary Genes Conferring Agronomic Traits

[1050] As described herein above, in particular embodiments, the invention encompasses the use of the CRISPR-C2c1 system as described herein for the insertion of a DNA of interest, including one or more plant expressible gene(s). In further particular embodiments, the invention encompasses methods and tools using the C2c1 system as described herein for partial or complete deletion of one or more plant expressed gene(s). In other further particular embodiments, the invention encompasses methods and tools using the C2c1 system as described herein to ensure modification of one or more plant-expressed genes by mutation, substitution, insertion of one of more nucleotides. In other particular embodiments, the invention encompasses the use of CRISPR-C2c1 system as described herein to ensure modification of expression of one or more plant-expressed genes by specific modification of one or more of the regulatory elements directing expression of said genes.

[1051] In particular embodiments, the invention encompasses methods which involve the introduction of exogenous genes and/or the targeting of endogenous genes and their regulatory elements, such as listed below: 1. Genes that confer resistance to pests or diseases:

[1052] Plant disease resistance genes. A plant can be transformed with cloned resistance genes to engineer plants that are resistant to specific pathogen strains. See, e.g., Jones et al., Science 266:789 (1994) (cloning of the tomato Cf-9 gene for resistance to Cladosporium fulvum); Martin et al., Science 262:1432 (1993) (tomato Pto gene for resistance to Pseudomonas syringae pv. tomato encodes a protein kinase); Mindrinos et al., Cell 78:1089 (1994) (Arabidopsmay be RSP2 gene for resistance to Pseudomonas syringae). A plant gene that is upregulated or down regulated during pathogen infection can be engineered for pathogen resistance. See, e.g., Thomazella et al., bioRxiv 064824; doi: doi.org/10.1101/064824 Epub. Jul. 23, 2016 (tomato plants with deletions in the SlDMR6-1 which is normally upregulated during pathogen infection).

[1053] Genes conferring resistance to a pest, such as soybean cyst nematode. See e.g., PCT Application WO 96/30517; PCT Application WO 93/19181.

[1054] Bacillus thuringiensis proteins see, e.g., Geiser et al., Gene 48:109 (1986).

[1055] Lectins, see, for example, Van Damme et al., Plant Molec. Biol. 24:25 (1994.

[1056] Vitamin-binding protein, such as avidin, see PCT application US93/06487, teaching the use of avidin and avidin homologues as larvicides against insect pests.

[1057] Enzyme inhibitors such as protease or proteinase inhibitors or amylase inhibitors. See, e.g., Abe et al., J. Biol. Chem. 262:16793 (1987), Huub et al., Plant Molec. Biol. 21:985 (1993)), Sumitani et al., Biosci. Biotech. Biochem. 57:1243 (1993) and U.S. Pat. No. 5,494,813.

[1058] Insect-specific hormones or pheromones such as ecdysteroid or juvenile hormone, a variant thereof, a mimetic based thereon, or an antagonist or agonist thereof. See, for example Hammock et al., Nature 344:458 (1990).

[1059] Insect-specific peptides or neuropeptides which, upon expression, disrupts the physiology of the affected pest. For example Regan, J. Biol. Chem. 269:9 (1994) and Pratt et al., Biochem. Biophys. Res. Comm. 163:1243 (1989). See also U.S. Pat. No. 5,266,317.

[1060] Insect-specific venom produced in nature by a snake, a wasp, or any other organism. For example, see Pang et al., Gene 116: 165 (1992).

[1061] Enzymes responsible for a hyperaccumulation of a monoterpene, a sesquiterpene, a steroid, hydroxamic acid, a phenylpropanoid derivative or another nonprotein molecule with insecticidal activity.

[1062] Enzymes involved in the modification, including the post-translational modification, of a biologically active molecule; for example, a glycolytic enzyme, a proteolytic enzyme, a lipolytic enzyme, a nuclease, a cyclase, a transaminase, an esterase, a hydrolase, a phosphatase, a kinase, a phosphorylase, a polymerase, an elastase, a chitinase and a glucanase, whether natural or synthetic. See PCT application WO93/02197, Kramer et al., Insect Biochem. Molec. Biol. 23:691 (1993) and Kawalleck et al., Plant Molec. Biol. 21:673 (1993).

[1063] Molecules that stimulates signal transduction. For example, see Botella et al., Plant Molec. Biol. 24:757 (1994), and Griess et al., Plant Physiol. 104:1467 (1994).

[1064] Viral-invasive proteins or a complex toxin derived therefrom. See Beachy et al., Ann. rev. Phytopathol. 28:451 (1990).

[1065] Developmental-arrestive proteins produced in nature by a pathogen or a parasite. See Lamb et al., Bio/Technology 10:1436 (1992) and Toubart et al., Plant J. 2:367 (1992).

[1066] A developmental-arrestive protein produced in nature by a plant. For example, Logemann et al., Bio/Technology 10:305 (1992).

[1067] In plants, pathogens are often host-specific. For example, some Fusarium species will cause tomato wilt but attacks only tomato, and other Fusarium species attack only wheat. Plants have existing and induced defenses to resist most pathogens. Mutations and recombination events across plant generations lead to genetic variability that gives rise to susceptibility, especially as pathogens reproduce with more frequency than plants. In plants there can be non-host resistance, e.g., the host and pathogen are incompatible or there can be partial resistance against all races of a pathogen, typically controlled by many genes and/or also complete resistance to some races of a pathogen but not to other races. Such resistance is typically controlled by a few genes. Using methods and components of the CRISPR-C2c1 system, a new tool now exists to induce specific mutations in anticipation hereon. Accordingly, one can analyze the genome of sources of resistance genes, and in plants having desired characteristics or traits, use the method and components of the CRISPR-C2c1 system to induce the rise of resistance genes. The present systems can do so with more precision than previous mutagenic agents and hence accelerate and improve plant breeding programs.

### 2. Genes Involved in Plant Diseases

[1068] Genes involved in plant diseases. A plant can be transformed with the CRISPR-C2c1 system that modify disease susceptible or related genes to engineer plants that are resistant to specific pathogen strains. For example, plant SWEET genes encoding putative sugar transporters are known to be induced by TAL Effectors from rice-pathogenic Xanthomonas oryzae, resulting in enhanced spreading of pathogen infection. See Streubel et al, New Phytologist, 2013 November; 200(3):808-19. doi: 10.1111/nph.12411. Epub 2013 Jul. 24. The CsLOB of citrus is known to be induced by TAL Effectors involved in citrus disease, such as citrus cranker.

[1069] The invention also provides a method of modifying a locus of interest in a plant cell comprising contacting the cell with any of the herein-described engineered CRISPR enzymes (e.g. engineered Cas effector module), compositions or any of the herein-described systems or vector systems, or wherein the cell comprises any of the herein-described CRISPR complexes present within the cell. In certain embodiments, the plant cell may comprise an A/T rich genome. In some embodiments, the cell genome comprises T-rich PAMs. In particular embodiments, the PAM is 5′-TTN-3′ or 5′-ATTN-3′. In particular embodiments, the modified locus is related to plant disease. In a particular embodiment, the plant disease is related to pathogen susceptibility. In a particular embodiment, the modified locus comprises a SWEET locus or a CsLOB locus. In a particular embodiment, the plant disease is citrus cranker or rice blight disease. In some embodiments, the cell genome comprises T-rich PAMs. In particular embodiments, the PAM is 5′-TTN-3′ or 5′-ATTN-3′. In some embodiments, the CRISPR-Cas system is a CRISPR-C2c1 system. In some embodiments, the locus of interest is modified by the C2c1 effector protein by introducing a staggered cut with a 5′ overhang. In particular embodiments, the 5′ overhang is 7 nt. In some embodiments, the locus of interest is modified by a single nucleotide deletion or mutation. In some embodiments, the locus of interest is modified by a mutation or deletion of less than 50 nt. In some embodiments, the locus of interest is modified by a staggered cut with a 5′ overhang introduced by the CRISPR-C2c1 system with HDR. In some embodiments, the locus of interest is modified by a staggered cut with a 5′ overhang introduced by the CRISPR-C2c 1 system with NHEJ. In some embodiments, the locus of interest is modified by a staggered cut with a 5′ overhang introduced by the CRISPR-C2c1 system in the distal end of PAM, followed by repair with HDR. In some embodiments, the locus of interest is modified by insertion of an exogenous DNA sequence introduced by the CRISPR-C2c1 system at the 5′ overhang with HDR. In preferred embodiments, the locus of interest is modified by insertion of an exogenous DNA sequence introduced by the CRISPR-C2c1 system at the 5′ overhang with HDR.

[1070] Genes involved in plant diseases, such as those listed in WO 2013046247:

[1071] Rice diseases: Magnaporthe grisea, Cochliobolus miyabeanus, Rhizoctonia solani, Gibberella fujikuroi; Wheat diseases: Erysiphe graminis, Fusarium graminearum, F. avenaceum, F. culmorum, Microdochium nivale, Puccinia striiformis, P. graminis, P. recondita, Micronectriella nivale, Typhula sp., Ustilago tritici, Tilletia caries, Pseudocercosporella herpotrichoides, Mycosphaerella graminicola, Stagonospora nodorum, Pyrenophora tritici-repentis; Barley diseases: Erysiphe graminis, Fusarium graminearum, F. avenaceum, F. culmorum, Microdochium nivale, Puccinia striiformis, P. graminis, P. hordei, Ustilago nuda, Rhynchosporium secalis, Pyrenophora teres, Cochliobolus sativus, Pyrenophora graminea, Rhizoctonia solani; Maize diseases: Ustilago maydis, Cochliobolus heterostrophus, Gloeocercospora sorghi, Puccinia polysora, Cercospora zeae-maydis, Rhizoctonia solani;

[1072] Citrus diseases: Diaporthe citri, Elsinoe fawcetti, Penicillium digitatum, P. italicum, Phytophthora parasitica, Phytophthora citrophthora; Apple diseases: Monilinia mali, Valsa ceratosperma, Podosphaera leucotricha, Alternaria alternata apple pathotype, Venturia inaequalis, Colletotrichum acutatum, Phytophtora cactorum;

[1073] Pear diseases: Venturia nashicola, V. pirina, Alternaria alternata Japanese pear pathotype, Gymnosporangium haraeanum, Phytophtora cactorum;

[1074] Peach diseases: Monilinia fructicola, Cladosporium carpophilum, Phomopsis sp.;

[1075] Grape diseases: Elsinoe ampelina, Glomerella cingulata, Uninula necator, Phakopsora ampelopsidis, Guignardia bidwellii, Plasmopara viticola;

[1076] Persimmon diseases: Gloesporium kaki, Cercospora kaki, Mycosphaerela nawae;

[1077] Gourd diseases: Colletotrichum lagenarium, Sphaerotheca fuliginea, Mycosphaerella melonis, Fusarium oxysporum, Pseudoperonospora cubensis, Phytophthora sp., Pythium sp.;

[1078] Tomato diseases: Alternaria solani, Cladosporium fulvum, Phytophthora infestans; Pseudomonas syringae pv. Tomato; Phytophthora capsici; Xanthomonas

[1079] Eggplant diseases: Phomopsis vexans, Erysiphe cichoracearum; Brassicaceous vegetable diseases: Alternaria japonica, Cercosporella brassicae, Plasmodiophora brassicae, Peronospora parasitica;

[1080] Welsh onion diseases: Puccinia allii, Peronospora destructor;

[1081] Soybean diseases: Cercospora kikuchii, Elsinoe glycines, Diaporthe phaseolorum var. sojae, Septoria glycines, Cercospora sojina, Phakopsora pachyrhizi, Phytophthora sojae, Rhizoctonia solani, Corynespora casiicola, Sclerotinia sclerotiorum;

[1082] Kidney bean diseases: Colletrichum lindemthianum;

[1083] Peanut diseases: Cercospora personata, Cercospora arachidicola, Sclerotium rolfsii;

[1084] Pea diseases pea: Erysiphe pisi;

[1085] Potato diseases: Alternaria solani, Phytophthora infestans, Phytophthora erythroseptica, Spongospora subterranean, f. sp. Subterranean;

[1086] Strawberry diseases: Sphaerotheca humuli, Glomerella cingulata;

[1087] Tea diseases: Exobasidium reticulatum, Elsinoe leucospila, Pestalotiopsis sp., Colletotrichum theae-sinensis;

[1088] Tobacco diseases: Alternaria longipes, Erysiphe cichoracearum, Colletotrichum tabacum, Peronospora tabacina, Phytophthora nicotianae;

[1089] Rapeseed diseases: Sclerotinia sclerotiorum, Rhizoctonia solani;

[1090] Cotton diseases: Rhizoctonia solani;

[1091] Beet diseases: Cercospora beticola, Thanatephorus cucumeris, Thanatephorus cucumeris, Aphanomyces cochlioides;

[1092] Rose diseases: Diplocarpon rosae, Sphaerotheca pannosa, Peronospora sparsa;

[1093] Diseases of chrysanthemum and asteraceae: Bremia lactuca, Septoria chrysanthemi-indici, Puccinia horiana;

[1094] Diseases of various plants: Pythium aphanidermatum, Pythium debarianum, Pythium graminicola, Pythium irregulare, Pythium ultimum, Botrytis cinerea, Sclerotinia sclerotiorum;

[1095] Radish diseases: Alternaria brassicicola;

[1096] Zoysia diseases: Sclerotinia homeocarpa, Rhizoctonia solani;

[1097] Banana diseases: Mycosphaerella fijiensis, Mycosphaerella musicola;

[1098] Sunflower diseases: Plasmopara halstedii;

[1099] Seed diseases or diseases in the initial stage of growth of various plants caused by Aspergillus spp., Penicillium spp., Fusarium spp., Gibberella spp., Tricoderma spp., Thielaviopsis spp., Rhizopus spp., Mucor spp., Corticium spp., Rhoma spp., Rhizoctonia spp., Diplodia spp., or the like;

[1100] Virus diseases of various plants mediated by Polymixa spp., Olpidium spp., or the like.

[1101] 3. Examples of Genes that Confer Resistance to Herbicides:

[1102] Resistance to herbicides that inhibit the growing point or meristem, such as an imidazolinone or a sulfonylurea, for example, by Lee et al., EMBO J. 7:1241 (1988), and Miki et al., Theor. Appl. Genet. 80:449 (1990), respectively.

[1103] Glyphosate tolerance (resistance conferred by, e.g., mutant 5-enolpyruvylshikimate-3-phosphate synthase (EPSPs) genes, aroA genes and glyphosate acetyl transferase (GAT) genes, respectively), or resistance to other phosphono compounds such as by glufosinate (phosphinothricin acetyl transferase (PAT) genes from Streptomyces species, including Streptomyces hygroscopicus and Streptomyces viridichromogenes), and to pyridinoxy or phenoxy proprionic acids and cyclohexones by ACCase inhibitor-encoding genes. See, for example, U.S. Pat. Nos. 4,940,835 and 6,248,876, 4,769,061, EP No. 0 333 033 and 4,975,374. See also EP No. 0242246, DeGreef et al., Bio/Technology 7:61 (1989), Marshall et al., Theor. Appl. Genet. 83:435 (1992), WO 2005012515 to Castle et. al. and WO 2005107437.

[1104] Resistance to herbicides that inhibit photosynthesis, such as a triazine (psbA and gs+ genes) or a benzonitrile (nitrilase gene), and glutathione S-transferase in Przibila et al., Plant Cell 3:169 (1991), U.S. Pat. No. 4,810,648, and Hayes et al., Biochem. J. 285: 173 (1992).

[1105] Genes encoding Enzymes detoxifying the herbicide or a mutant glutamine synthase enzyme that is resistant to inhibition, e.g. n U.S. patent application Ser. No. 11/760,602. Or a detoxifying enzyme is an enzyme encoding a phosphinothricin acetyltransferase (such as the bar or pat protein from Streptomyces species). Phosphinothricin acetyltransferases are for example described in U.S. Pat. Nos. 5,561,236; 5,648,477; 5,646,024; 5,273,894; 5,637,489; 5,276,268; 5,739,082; 5,908,810 and 7,112,665.

[1106] Hydroxyphenylpyruvatedioxygenases (HPPD) inhibitors, ie naturally occurring HPPD resistant enzymes, or genes encoding a mutated or chimeric HPPD enzyme as described in WO 96/38567, WO 99/24585, and WO 99/24586, WO 2009/144079, WO 2002/046387, or U.S. Pat. No. 6,768,044.

### 4. Examples of Genes Involved in Abiotic Stress Tolerance:

[1107] Transgene capable of reducing the expression and/or the activity of poly(ADP-ribose) polymerase (PARP) gene in the plant cells or plants as described in WO 00/04173 or, WO/2006/045633.

[1108] Transgenes capable of reducing the expression and/or the activity of the PARG encoding genes of the plants or plants cells, as described e.g. in WO 2004/090140.

[1109] Transgenes coding for a plant-functional enzyme of the nicotineamide adenine dinucleotide salvage synthesis pathway including nicotinamidase, nicotinate phosphoribosyltransferase, nicotinic acid mononucleotide adenyl transferase, nicotinamide adenine dinucleotide synthetase or nicotine amide phosphorybosyltransferase as described e.g. in EP 04077624.7, WO 2006/133827, PCT/EP07/002,433, EP 1999263, or WO 2007/107326.

[1110] Enzymes involved in carbohydrate biosynthesis include those described in e.g. EP 0571427, WO 95/04826, EP 0719338, WO 96/15248, WO 96/19581, WO 96/27674, WO 97/11188, WO 97/26362, WO 97/32985, WO 97/42328, WO 97/44472, WO 97/45545, WO 98/27212, WO 98/40503, WO99/58688, WO 99/58690, WO 99/58654, WO 00/08184, WO 00/08185, WO 00/08175, WO 00/28052, WO 00/77229, WO 01/12782, WO 01/12826, WO 02/101059, WO 03/071860, WO 2004/056999, WO 2005/030942, WO 2005/030941, WO 2005/095632, WO 2005/095617, WO 2005/095619, WO 2005/095618, WO 2005/123927, WO 2006/018319, WO 2006/103107, WO 2006/108702, WO 2007/009823, WO 00/22140, WO 2006/063862, WO 2006/072603, WO 02/034923, EP 06090134.5, EP 06090228.5, EP 06090227.7, EP 07090007.1, EP 07090009.7, WO 01/14569, WO 02/79410, WO 03/33540, WO 2004/078983, WO 01/19975, WO 95/26407, WO 96/34968, WO 98/20145, WO 99/12950, WO 99/66050, WO 99/53072, U.S. Pat. No. 6,734,341, WO 00/11192, WO 98/22604, WO 98/32326, WO 01/98509, WO 01/98509, WO 2005/002359, U.S. Pat. Nos. 5,824,790, 6,013,861, WO 94/04693, WO 94/09144, WO 94/11520, WO 95/35026 or WO 97/20936 or enzymes involved in the production of polyfructose, especially of the inulin and levan-type, as disclosed in EP 0663956, WO 96/01904, WO 96/21023, WO 98/39460, and WO 99/24593, the production of alpha-1,4-glucans as disclosed in WO 95/31553, US 2002031826, U.S. Pat. Nos. 6,284,479, 5,712,107, WO 97/47806, WO 97/47807, WO 97/47808 and WO 00/14249, the production of alpha-1,6 branched alpha-1,4-glucans, as disclosed in WO 00/73422, the production of alternan, as disclosed in e.g. WO 00/47727, WO 00/73422, EP 06077301.7, U.S. Pat. No. 5,908,975 and EP 0728213, the production of hyaluronan, as for example disclosed in WO 2006/032538, WO 2007/039314, WO 2007/039315, WO 2007/039316, JP 2006304779, and WO 2005/012529.

[1111] Genes that improve drought resistance. For example, WO 2013122472 discloses that the absence or reduced level of functional Ubiquitin Protein Ligase protein (UPL) protein, more specifically, UPL3, leads to a decreased need for water or improved resistance to drought of said plant. Other examples of transgenic plants with increased drought tolerance are disclosed in, for example, US 2009/0144850, US 2007/0266453, and WO 2002/083911. US2009/0144850 describes a plant displaying a drought tolerance phenotype due to altered expression of a DR02 nucleic acid. US 2007/0266453 describes a plant displaying a drought tolerance phenotype due to altered expression of a DR03 nucleic acid and WO 2002/08391 1 describes a plant having an increased tolerance to drought stress due to a reduced activity of an ABC transporter which is expressed in guard cells. Another example is the work by Kasuga and co-authors (1999), who describe that overexpression of cDNA encoding DREB1 A in transgenic plants activated the expression of many stress tolerance genes under normal growing conditions and resulted in improved tolerance to drought, salt loading, and freezing. However, the expression of DREB1A also resulted in severe growth retardation under normal growing conditions (Kasuga (1999) Nat Biotechnol 17(3) 287-291).

[1112] In further particular embodiments, crop plants can be improved by influencing specific plant traits. For example, by developing pesticide-resistant plants, improving disease resistance in plants, improving plant insect and nematode resistance, improving plant resistance against parasitic weeds, improving plant drought tolerance, improving plant nutritional value, improving plant stress tolerance, avoiding self-pollination, plant forage digestibility biomass, grain yield etc. A few specific non-limiting examples are provided hereinbelow.

[1113] In addition to targeted mutation of single genes, C2c1 CRISPR complexes can be designed to allow targeted mutation of multiple genes, deletion of chromosomal fragment, site-specific integration of transgene, site-directed mutagenesis in vivo, and precise gene replacement or allele swapping in plants. Therefore, the methods described herein have broad applications in gene discovery and validation, mutational and cisgenic breeding, and hybrid breeding. These applications facilitate the production of a new generation of genetically modified crops with various improved agronomic traits such as herbicide resistance, disease resistance, abiotic stress tolerance, high yield, and superior quality.

### Use of C2c1 Gene to Create Male Sterile Plants

[1114] Hybrid plants typically have advantageous agronomic traits compared to inbred plants. However, for self-pollinating plants, the generation of hybrids can be challenging. In different plant types, genes have been identified which are important for plant fertility, more particularly male fertility. For instance, in maize, at least two genes have been identified which are important in fertility (Amitabh Mohanty International Conference on New Plant Breeding Molecular Technologies Technology Development And Regulation, Oct. 9-10, 2014, Jaipur, India; Svitashev et al. Plant Physiol. 2015 October; 169(2):931-45; Djukanovic et al. Plant J. 2013 December; 76(5):888-99). The methods provided herein can be used to target genes required for male fertility so as to generate male sterile plants which can easily be crossed to generate hybrids. In particular embodiments, the CRISPR-C2c1 system provided herein is used for targeted mutagenesis of the cytochrome P450-like gene (MS26) or the meganuclease gene (MS45) thereby conferring male sterility to the maize plant. Maize plants which are as such genetically altered can be used in hybrid breeding programs.

### Increasing the Fertility Stage in Plants

[1115] In particular embodiments, the methods provided herein are used to prolong the fertility stage of a plant such as of a rice plant. For instance, a rice fertility stage gene such as Ehd3 can be targeted in order to generate a mutation in the gene and plantlets can be selected for a prolonged regeneration plant fertility stage (as described in CN 104004782)

### Use of C2c1 to Generate Genetic Variation in a Crop of Interest

[1116] The availability of wild germplasm and genetic variations in crop plants is the key to crop improvement programs, but the available diversity in germplasms from crop plants is limited. The present invention envisages methods for generating a diversity of genetic variations in a germplasm of interest. In this application of the CRISPR-C2c1 system a library of guide RNAs targeting different locations in the plant genome is provided and is introduced into plant cells together with the C2c1 effector protein. In this way a collection of genome-scale point mutations and gene knock-outs can be generated. In particular embodiments, the methods comprise generating a plant part or plant from the cells so obtained and screening the cells for a trait of interest. The target genes can include both coding and non-coding regions. In particular embodiments, the trait is stress tolerance and the method is a method for the generation of stress-tolerant crop varieties Use of C2c1 to affect fruit-ripening

[1117] Ripening is a normal phase in the maturation process of fruits and vegetables. Only a few days after it starts it renders a fruit or vegetable inedible. This process brings significant losses to both farmers and consumers. In particular embodiments, the methods of the present invention are used to reduce ethylene production. This is ensured by ensuring one or more of the following: a. Suppression of ACC synthase gene expression. ACC (1-aminocyclopropane-1-carboxylic acid) synthase is the enzyme responsible for the conversion of S-adenosylmethionine (SAM) to ACC; the second to the last step in ethylene biosynthesis. Enzyme expression is hindered when an antisense (“mirror-image”) or truncated copy of the synthase gene is inserted into the plant's genome; b. Insertion of the ACC deaminase gene. The gene coding for the enzyme is obtained from Pseudomonas chlororaphis, a common nonpathogenic soil bacterium. It converts ACC to a different compound thereby reducing the amount of ACC available for ethylene production; c. Insertion of the SAM hydrolase gene. This approach is similar to ACC deaminase wherein ethylene production is hindered when the amount of its precursor metabolite is reduced; in this case SAM is converted to homoserine. The gene coding for the enzyme is obtained from E. coli T3 bacteriophage and d. Suppression of ACC oxidase gene expression. ACC oxidase is the enzyme which catalyzes the oxidation of ACC to ethylene, the last step in the ethylene biosynthetic pathway. Using the methods described herein, down regulation of the ACC oxidase gene results in the suppression of ethylene production, thereby delaying fruit ripening. In particular embodiments, additionally or alternatively to the modifications described above, the methods described herein are used to modify ethylene receptors, so as to interfere with ethylene signals obtained by the fruit. In particular embodiments, expression of the ETR1 gene, encoding an ethylene binding protein is modified, more particularly suppressed. In particular embodiments, additionally or alternatively to the modifications described above, the methods described herein are used to modify expression of the gene encoding Polygalacturonase (PG), which is the enzyme responsible for the breakdown of pectin, the substance that maintains the integrity of plant cell walls. Pectin breakdown occurs at the start of the ripening process resulting in the softening of the fruit. Accordingly, in particular embodiments, the methods described herein are used to introduce a mutation in the PG gene or to suppress activation of the PG gene in order to reduce the amount of PG enzyme produced thereby delaying pectin degradation.

[1118] Thus in particular embodiments, the methods comprise the use of the CRISPR-C2c1 system to ensure one or more modifications of the genome of a plant cell such as described above, and regenerating a plant therefrom. In particular embodiments, the plant is a tomato plant.

### Increasing Storage Life of Plants

[1119] In particular embodiments, the methods of the present invention are used to modify genes involved in the production of compounds which affect storage life of the plant or plant part. More particularly, the modification is in a gene that prevents the accumulation of reducing sugars in potato tubers. Upon high-temperature processing, these reducing sugars react with free amino acids, resulting in brown, bitter-tasting products and elevated levels of acrylamide, which is a potential carcinogen. In particular embodiments, the methods provided herein are used to reduce or inhibit expression of the vacuolar invertase gene (VInv), which encodes a protein that breaks down sucrose to glucose and fructose (Clasen et al. DOI: 10.1111/pbi.12370).

### The Use of the CRISPR-C2c1 System to Ensure a Value Added Trait

[1120] In particular embodiments the CRISPR-C2c1 system is used to produce nutritionally improved agricultural crops. In particular embodiments, the methods provided herein are adapted to generate “functional foods”, i.e. a modified food or food ingredient that may provide a health benefit beyond the traditional nutrients it contains and or “nutraceutical”, i.e. substances that may be considered a food or part of a food and provides health benefits, including the prevention and treatment of disease. In particular embodiments, the nutraceutical is useful in the prevention and/or treatment of one or more of cancer, diabetes, cardiovascular disease, and hypertension.

[1121] Examples of nutritionally improved crops include (Newell-McGloughlin, Plant Physiology, July 2008, Vol. 147, pp. 939-953):

[1122] modified protein quality, content and/or amino acid composition, such as have been described for Bahiagrass (Luciani et al. 2005, Florida Genetics Conference Poster), Canola (Roesler et al., 1997, Plant Physiol 113 75-81), Maize (Cromwell et al, 1967, 1969 J Anim Sci 26 1325-1331, O'Quin et al. 2000 J Anim Sci 78 2144-2149, Yang et al. 2002, Transgenic Res 11 11-20, Young et al. 2004, Plant J 38 910-922), Potato (Yu J and Ao, 1997 Acta Bot Sin 39 329-334; Chakraborty et al. 2000, Proc Natl Acad Sci USA 97 3724-3729; Li et al. 2001) Chin Sci Bull 46 482-484, Rice (Katsube et al. 1999, Plant Physiol 120 1063-1074), Soybean (Dinkins et al. 2001, Rapp 2002, In Vitro Cell Dev Biol Plant 37 742-747), Sweet Potato (Egnin and Prakash 1997, In Vitro Cell Dev Biol 33 52A).

[1123] essential amino acid content, such as has been described for Canola (Falco et al. 1995, Bio/Technology 13 577-582), Lupin (White et al. 2001, J Sci Food Agric 81 147-154), Maize (Lai and Messing, 2002, Agbios 2008 GM crop database (Mar. 11, 2008)), Potato (Zeh et al. 2001, Plant Physiol 127 792-802), Sorghum (Zhao et al. 2003, Kluwer Academic Publishers, Dordrecht, The Netherlands, pp 413-416), Soybean (Falco et al. 1995 Bio/Technology 13 577-582; Galili et al. 2002 Crit Rev Plant Sci 21 167-204).

[1124] Oils and Fatty acids such as for Canola (Dehesh et al. (1996) Plant J 9 167-172 [PubMed]; Del Vecchio (1996) INFORM International News on Fats, Oils and Related Materials 7 230-243; Roesler et al. (1997) Plant Physiol 113 75-81 [PMC free article][PubMed]; Froman and Ursin (2002, 2003) Abstracts of Papers of the American Chemical Society 223 U35; James et al. (2003) Am J Clin Nutr 77 1140-1145 [PubMed]; Agbios (2008, above); coton (Chapman et al. (2001). J Am Oil Chem Soc 78 941-947; Liu et al. (2002) J Am Coll Nutr 21 205S-211S [PubMed]; O'Neill (2007) Australian Life Scientist. www.biotechnews.com.au/index.php/id; 866694817;fp; 4;fpid; 2 (Jun. 17, 2008), Linseed (Abbadi et al., 2004, Plant Cell 16: 2734-2748), Maize (Young et al., 2004, Plant J 38 910-922), oil palm (Jalani et al. 1997, J Am Oil Chem Soc 74 1451-1455; Parveez, 2003, AgBiotechNet 113 1-8), Rice (Anai et al., 2003, Plant Cell Rep 21988-992), Soybean (Reddy and Thomas, 1996, Nat Biotechnol 14 639-642; Kinney and Kwolton, 1998, Blackie Academic and Professional, London, pp 193-213), Sunflower (Arcadia, Biosciences 2008)

[1125] Carbohydrates, such as Fructans described for Chicory (Smeekens (1997) Trends Plant Sci 2 286-287, Sprenger et al. (1997) FEBS Lett 400 355-358, Sevenier et al. (1998) Nat Biotechnol 16 843-846), Maize (Caimi et al. (1996) Plant Physiol 110 355-363), Potato (Hellwege et al., 1997 Plant J 12 1057-1065), Sugar Beet (Smeekens et al. 1997, above), Inulin, such as described for Potato (Hellewege et al. 2000, Proc Natl Acad Sci USA 97 8699-8704), Starch, such as described for Rice (Schwall et al. (2000) Nat Biotechnol 18 551-554, Chiang et al. (2005) Mol Breed 15 125-143),

[1126] Vitamins and carotenoids, such as described for Canola (Shintani and DellaPenna (1998) Science 282 2098-2100), Maize (Rocheford et al. (2002). J Am Coll Nutr 21 191S-1985, Cahoon et al. (2003) Nat Biotechnol 21 1082-1087, Chen et al. (2003) Proc Natl Acad Sci USA 100 3525-3530), Mustardseed (Shewmaker et al. (1999) Plant J 20 401-412, Potato (Ducreux et al., 2005, J Exp Bot 56 81-89), Rice (Ye et al. (2000) Science 287 303-305, Strawberry (Agius et al. (2003), Nat Biotechnol 21 177-181), Tomato (Rosati et al. (2000) Plant J 24 413-419, Fraser et al. (2001) J Sci Food Agric 81 822-827, Mehta et al. (2002) Nat Biotechnol 20 613-618, Diaz de la Garza et al. (2004) Proc Natl Acad Sci USA 101 13720-13725, Enfissi et al. (2005) Plant Biotechnol J 3 17-27, DellaPenna (2007) Proc Natl Acad Sci USA 104 3675-3676.

[1127] Functional secondary metabolites, such as described for Apple (stilbenes, Szankowski et al. (2003) Plant Cell Rep 22: 141-149), Alfalfa (resveratrol, Hipskind and Paiva (2000) Mol Plant Microbe Interact 13 551-562), Kiwi (resveratrol, Kobayashi et al. (2000) Plant Cell Rep 19 904-910), Maize and Soybean (flavonoids, Yu et al. (2000) Plant Physiol 124 781-794), Potato (anthocyanin and alkaloid glycoside, Lukaszewicz et al. (2004) J Agric Food Chem 52 1526-1533), Rice (flavonoids & resveratrol, Stark-Lorenzen et al. (1997) Plant Cell Rep 16 668-673, Shin et al. (2006) Plant Biotechnol J 4 303-315), Tomato (+resveratrol, chlorogenic acid, flavonoids, stilbene; Rosati et al. (2000) above, Muir et al. (2001) Nature 19 470-474, Niggeweg et al. (2004) Nat Biotechnol 22 746-754, Giovinazzo et al. (2005) Plant Biotechnol J 3 57-69), wheat (caffeic and ferulic acids, resveratrol; United Press International (2002)); and

[1128] Mineral availabilities such as described for Alfalfa (phytase, Austin-Phillips et al. (1999) www.molecularfarming.com/nonmedical.html), Lettuse (iron, Goto et al. (2000) Theor Appl Genet 100 658-664), Rice (iron, Lucca et al. (2002) J Am Coll Nutr 21 184S-190S), Maize, Soybean and wheate (phytase, Drakakaki et al. (2005) Plant Mol Biol 59 869-880, Denbow et al. (1998) Poult Sci 77 878-881, Brinch-Pedersen et al. (2000) Mol Breed 6 195-206).

[1129] In particular embodiments, the value-added trait is related to the envisaged health benefits of the compounds present in the plant. For instance, in particular embodiments, the value-added crop is obtained by applying the methods of the invention to ensure the modification of or induce/increase the synthesis of one or more of the following compounds:

[1130] Carotenoids, such as α-Carotene present in carrots which Neutralizes free radicals that may cause damage to cells or β-Carotene present in various fruits and vegetables which neutralizes free radicals

[1131] Lutein present in green vegetables which contributes to maintenance of healthy vision

[1132] Lycopene present in tomato and tomato products, which is believed to reduce the risk of prostate cancer

[1133] Zeaxanthin, present in citrus and maize, which contributes to maintenance of healthy vision

[1134] Dietary fiber such as insoluble fiber present in wheat bran which may reduce the risk of breast and/or colon cancer and β-Glucan present in oat, soluble fiber present in Psylium and whole cereal grains which may reduce the risk of cardiovascular disease (CVD)

[1135] Fatty acids, such as ω-3 fatty acids which may reduce the risk of CVD and improve mental and visual functions, Conjugated linoleic acid, which may improve body composition, may decrease risk of certain cancers and GLA which may reduce inflammation risk of cancer and CVD, may improve body composition

[1136] Flavonoids such as Hydroxycinnamates, present in wheat which have Antioxidant-like activities, may reduce risk of degenerative diseases, flavonols, catechins and tannins present in fruits and vegetables which neutralize free radicals and may reduce risk of cancer

[1137] Glucosinolates, indoles, isothiocyanates, such as Sulforaphane, present in Cruciferous vegetables (broccoli, kale), horseradish, which neutralize free radicals, may reduce risk of cancer

[1138] Phenolics, such as stilbenes present in grape which May reduce risk of degenerative diseases, heart disease, and cancer, may have longevity effect and caffeic acid and ferulic acid present in vegetables and citrus which have Antioxidant-like activities, may reduce risk of degenerative diseases, heart disease, and eye disease, and epicatechin present in cacao which has Antioxidant-like activities, may reduce risk of degenerative diseases and heart disease

[1139] Plant stanols/sterols present in maize, soy, wheat and wooden oils which May reduce risk of coronary heart disease by lowering blood cholesterol levels

[1140] Fructans, inulins, fructo-oligosaccharides present in Jerusalem artichoke, shallot, onion powder which may improve gastrointestinal health

[1141] Saponins present in soybean, which may lower LDL cholesterol

[1142] Soybean protein present in soybean which may reduce risk of heart disease

[1143] Phytoestrogens such as isoflavones present in soybean which May reduce menopause symptoms, such as hot flashes, may reduce osteoporosis and CVD and lignans present in flax, rye and vegetables, which May protect against heart disease and some cancers, may lower LDL cholesterol, total cholesterol.

[1144] Sulfides and thiols such as diallyl sulphide present in onion, garlic, olive, leek and scallon and Allyl methyl trisulfide, dithiolthiones present in cruciferous vegetables which may lower LDL cholesterol, helps to maintain healthy immune system

[1145] Tannins, such as proanthocyanidins, present in cranberry, cocoa, which may improve urinary tract health, may reduce risk of CVD and high blood pressure.

[1146] In addition, the methods of the present invention also envisage modifying protein/starch functionality, shelf life, taste/aesthetics, fiber quality, and allergen, antinutrient, and toxin reduction traits.

[1147] Accordingly, the invention encompasses methods for producing plants with nutritional added value, said methods comprising introducing into a plant cell a gene encoding an enzyme involved in the production of a component of added nutritional value using the CRISPR-C2c1 system as described herein and regenerating a plant from said plant cell, said plant characterized in an increase expression of said component of added nutritional value. In particular embodiments, the CRISPR-C2c1 system is used to modify the endogenous synthesis of these compounds indirectly, e.g. by modifying one or more transcription factors that controls the metabolism of this compound. Methods for introducing a gene of interest into a plant cell and/or modifying an endogenous gene using the CRISPR-C2c1 system are described herein above.

[1148] Some specific examples of modifications in plants that have been modified to confer value-added traits are: plants with modified fatty acid metabolism, for example, by transforming a plant with an antisense gene of stearyl-ACP desaturase to increase stearic acid content of the plant. See Knultzon et al., Proc. Natl. Acad. Sci. U.S.A. 89:2624 (1992). Another example involves decreasing phytate content, for example by cloning and then reintroducing DNA associated with the single allele which may be responsible for maize mutants characterized by low levels of phytic acid. See Raboy et al, Maydica 35:383 (1990).

[1149] Similarly, expression of the maize (Zea mays) Tfs C1 and R, which regulate the production of flavonoids in maize aleurone layers under the control of a strong promoter, resulted in a high accumulation rate of anthocyanins in Arabidopsis (Arabidopsis thaliana), presumably by activating the entire pathway (Bruce et al., 2000, Plant Cell 12:65-80). DellaPenna (Welsch et al., 2007 Annu Rev Plant Biol 57: 711-738) found that Tf RAP2.2 and its interacting partner SINAT2 increased carotenogenesis in Arabidopsis leaves. Expressing the Tf Dof1 induced the up-regulation of genes encoding enzymes for carbon skeleton production, a marked increase of amino acid content, and a reduction of the Glc level in transgenic Arabidopsis (Yanagisawa, 2004 Plant Cell Physiol 45: 386-391), and the DOF Tf AtDofl.1 (OBP2) up-regulated all steps in the glucosinolate biosynthetic pathway in Arabidopsis (Skirycz et al., 2006 Plant J 47: 10-24).

### Reducing Allergen in Plants

[1150] In particular embodiments the methods provided herein are used to generate plants with a reduced level of allergens, making them safer for the consumer. In particular embodiments, the methods comprise modifying expression of one or more genes responsible for the production of plant allergens. For instance, in particular embodiments, the methods comprise the method comprise delivering the CRISPR-C2c1 system to down-regulating expression of a Lol p5 gene in a plant cell, such as a ryegrass plant cell and regenerating a plant therefrom so as to reduce allergenicity of the pollen of said plant (Bhalla et al. 1999, Proc. Natl. Acad. Sci. USA Vol. 96: 11676-11680). In particular embodiments, the CRISPR-C2c1 system introduces one or more staggered double strand breaks (DSBs) to the Lol p5 gene. In other particular embodiments, the CRISPR-C2c1 system comprises a catalytically inactivated C2c1 protein associated with a functional domain that modifies the Lol p5 gene. In a particular embodiment, the CRISPR-C2c1 system introduces a single mutation to the Lol p5 gene. In another particular embodiment, the CRISPR-C2c1 system introduces a single nucleotide modification to the transcript of the Lol p5 gene.

[1151] Peanut allergies and allergies to legumes generally are a real and serious health concern. The C2c1 effector protein system of the present invention can be used to identify and then edit or silence genes encoding allergenic proteins of such legumes. Without limitation as to such genes and proteins, Nicolaou et al. identifies allergenic proteins in peanuts, soybeans, lentils, peas, lupin, green beans, and mung beans. See, Nicolaou et al., Current Opinion in Allergy and Clinical Immunology 2011; 11(3):222).

### Screening Methods for Endogenous Genes of Interest

[1152] The methods provided herein further allow the identification of genes of value encoding enzymes involved in the production of a component of added nutritional value or generally genes affecting agronomic traits of interest, across species, phyla, and plant kingdom. By selectively targeting e.g. genes encoding enzymes of metabolic pathways in plants using the CRISPR-C2c1 system as described herein, the genes responsible for certain nutritional aspects of a plant can be identified. Similarly, by selectively targeting genes which may affect a desirable agronomic trait, the relevant genes can be identified. Accordingly, the present invention encompasses screening methods for genes encoding enzymes involved in the production of compounds with a particular nutritional value and/or agronomic traits.

### Use of CRISPR-C2c1 System in Biofuel Production

[1153] The term “biofuel” as used herein is an alternative fuel made from plant and plant-derived resources. Renewable biofuels can be extracted from organic matter whose energy has been obtained through a process of carbon fixation or are made through the use or conversion of biomass. This biomass can be used directly for biofuels or can be converted to convenient energy containing substances by thermal conversion, chemical conversion, and biochemical conversion. This biomass conversion can result in fuel in solid, liquid, or gas form. There are two types of biofuels: bioethanol and biodiesel. Bioethanol is mainly produced by the sugar fermentation process of cellulose (starch), which is mostly derived from maize and sugar cane. Biodiesel on the other hand is mainly produced from oil crops such as rapeseed, palm, and soybean. Biofuels are used mainly for transportation.

### Enhancing Plant Properties for Biofuel Production

[1154] In particular embodiments, the methods using the CRISPR-C2c1 system as described herein are used to alter the properties of the cell wall in order to facilitate access by key hydrolysing agents for a more efficient release of sugars for fermentation. In particular embodiments, the biosynthesis of cellulose and/or lignin are modified. Cellulose is the major component of the cell wall. The biosynthesis of cellulose and lignin are co-regulated. By reducing the proportion of lignin in a plant the proportion of cellulose can be increased. In particular embodiments, the methods described herein are used to downregulate lignin biosynthesis in the plant so as to increase fermentable carbohydrates. More particularly, the methods described herein are used to downregulate at least a first lignin biosynthesis gene selected from the group consisting of 4-coumarate 3-hydroxylase (C3H), phenylalanine ammonia-lyase (PAL), cinnamate 4-hydroxylase (C4H), hydroxycinnamoyl transferase (HCT), caffeic acid O-methyltransferase (COMT), caffeoyl CoA 3-O-methyltransferase (CCoAOMT), ferulate 5-hydroxylase (F5H), cinnamyl alcohol dehydrogenase (CAD), cinnamoyl CoA-reductase (CCR), 4-coumarate-CoA ligase (4CL), monolignol-lignin-specific glycosyltransferase, and aldehyde dehydrogenase (ALDH) as disclosed in WO 2008064289 A2.

[1155] In particular embodiments, the methods described herein are used to produce plant mass that produces lower levels of acetic acid during fermentation (see also WO 2010096488). More particularly, the methods disclosed herein are used to generate mutations in homologs to CaslL to reduce polysaccharide acetylation.

### Modifying Yeast for Biofuel Production

[1156] In particular embodiments, the C2c1 enzyme provided herein is used for bioethanol production by recombinant micro-organisms. For instance, C2c1 can be used to engineer micro-organisms, such as yeast, to generate biofuel or biopolymers from fermentable sugars and optionally to be able to degrade plant-derived lignocellulose derived from agricultural waste as a source of fermentable sugars. More particularly, the invention provides methods whereby the C2c1 CRISPR complex is used to introduce foreign genes required for biofuel production into micro-organisms and/or to modify endogenous genes why may interfere with the biofuel synthesis. More particularly the methods involve introducing into a micro-organism such as a yeast one or more nucleotide sequence encoding enzymes involved in the conversion of pyruvate to ethanol or another product of interest. In particular embodiments the methods ensure the introduction of one or more enzymes which allows the micro-organism to degrade cellulose, such as a cellulase. In yet further embodiments, the C2c1 CRISPR complex is used to modify endogenous metabolic pathways which compete with the biofuel production pathway.

[1157] Accordingly, in more particular embodiments, the methods described herein are used to modify a micro-organism as follows:

[1158] to introduce at least one heterologous nucleic acid or increase expression of at least one endogenous nucleic acid encoding a plant cell wall degrading enzyme, such that said micro-organism is capable of expressing said nucleic acid and of producing and secreting said plant cell wall degrading enzyme;

[1159] to introduce at least one heterologous nucleic acid or increase expression of at least one endogenous nucleic acid encoding an enzyme that converts pyruvate to acetaldehyde optionally combined with at least one heterologous nucleic acid encoding an enzyme that converts acetaldehyde to ethanol such that said host cell is capable of expressing said nucleic acid; and/or

[1160] to modify at least one nucleic acid encoding for an enzyme in a metabolic pathway in said host cell, wherein said pathway produces a metabolite other than acetaldehyde from pyruvate or ethanol from acetaldehyde, and wherein said modification results in a reduced production of said metabolite, or to introduce at least one nucleic acid encoding for an inhibitor of said enzyme.

### Modifying Algae and Plants for Production of Vegetable Oils or Biofuels

[1161] Transgenic algae or other plants such as rape may be particularly useful in the production of vegetable oils or biofuels such as alcohols (especially methanol and ethanol), for instance. These may be engineered to express or overexpress high levels of oil or alcohols for use in the oil or biofuel industries.

[1162] According to particular embodiments of the invention, the CRISPR-C2c1 system is used to generate lipid-rich diatoms which are useful in biofuel production.

[1163] In particular embodiments, it is envisaged to specifically modify genes that are related to the biomass production produced by plants. In particular embodiments, the CRISPR-C2c1 system is used to generate high biomass plants by targeting the teosine branched (tb) genes or homologues thereof. In certain embodiments, the CRISPR-C2c1 system introduces one or more staggered double strand breaks (DSBs) to the tb genes. In a particular embodiment, the CRISPR-C2c1 system introduces a single mutation to the tb gene. In another particular embodiment, the CRISPR-C2c1 system introduces a single nucleotide modification to the transcript of the tb gene. In certain particular embodiments, the CRISPR-C2c1 system comprises a catalytically inactivated C2c1 protein associated to a functional domain such as an adenosine or cytidine deaminase (e.g. via fusion protein or suitable linkers) to introduce a single nucleotide mutation to the tb gene or homologues thereof. In a particular embodiment, the CRISPR-C2c1 system is used to generate high biomass switchgrass plants by targeting the tb1a and tb1b genes and introducing a single nucleotide mutation. See Liu et. al, Plant Biotechnology Journal (doi:10.1111/pbi.12778).

[1164] In particular embodiments it is envisaged to specifically modify genes that are involved in the modification of the quantity of lipids and/or the quality of the lipids produced by the algal cell. Examples of genes encoding enzymes involved in the pathways of fatty acid synthesis can encode proteins having for instance acetyl-CoA carboxylase, fatty acid synthase, 3-ketoacyl_acyl-carrier protein synthase III, glycerol-3-phospate deshydrogenase (G3PDH), Enoyl-acyl carrier protein reductase (Enoyl-ACP-reductase), glycerol-3-phosphate acyltransferase, lysophosphatidic acyl transferase or diacylglycerol acyltransferase, phospholipid:diacylglycerol acyltransferase, phoshatidate phosphatase, fatty acid thioesterase such as palmitoyi protein thioesterase, or malic enzyme activities. In further embodiments it is envisaged to generate diatoms that have increased lipid accumulation. This can be achieved by targeting genes that decrease lipid catabolisation. Of particular interest for use in the methods of the present invention are genes involved in the activation of both triacylglycerol and free fatty acids, as well as genes directly involved in β-oxidation of fatty acids, such as acyl-CoA synthetase, 3-ketoacyl-CoA thiolase, acyl-CoA oxidase activity and phosphoglucomutase. The CRISPR-C2c1 system and methods described herein can be used to specifically activate such genes in diatoms as to increase their lipid content.

[1165] Organisms such as microalgae are widely used for synthetic biology. Stovicek et al. (Metab. Eng. Comm., 2015; 2:13 describes genome editing of industrial yeast, for example, Saccharomyces cerevisae, to efficiently produce robust strains for industrial production. Stovicek used a CRISPR-Cas9 system codon-optimized for yeast to simultaneously disrupt both alleles of an endogenous gene and knock in a heterologous gene. Cas9 and gRNA were expressed from genomic or episomal 2-based vector locations. The authors also showed that gene disruption efficiency could be improved by optimization of the levels of Cas9 and gRNA expression. Hlavovi et al. (Biotechnol. Adv. 2015) discusses development of species or strains of microalgae using techniques such as CRISPR to target nuclear and chloroplast genes for insertional mutagenesis and screening. The methods of Stovicek and Hlavovi may be applied to the C2c1 effector protein system of the present invention. With respect to the CRISPR-C2c1 system, in some embodiments, the CRISPR-C2c1 system may recognize a PAM sequence of 5′ TTN 3′ or 5′ ATTN 3′, wherein N is any nucleotide. In some embodiments, the CRISPR-C2c1 system introduces one or more staggered double strand breaks (DSBs) to the target gene. In some embodiments, the CRISPR-C2c1 system introduces a template DNA sequence at the staggered DSB via HR or NHEJ. In some particular embodiments, the CRISPR-C2c1 system comprises a catalytically inactivated C2c1 protein associated with a functional domain that modifies the Lol p5 gene. In a particular embodiment, the CRISPR-C2c1 system introduces a single mutation. In another particular embodiment, the CRISPR-C2c1 system introduces a single nucleotide modification to the transcript.

[1166] U.S. Pat. No. 8,945,839 describes a method for engineering Micro-Algae (Chlamydomonas reinhardtii cells species) using Cas9. Using similar tools, the methods of the CRISPR-C2c1 system described herein can be applied on Chlamydomonas species and other algae. In particular embodiments, C2c1 and guide RNA are introduced in algae expressed using a vector that expresses C2c1 under the control of a constitutive promoter such as Hsp70A-Rbc S2 or Beta2-tubulin. Guide RNA will be delivered using a vector containing T7 promoter. Alternatively, C2c1 mRNA and in vitro transcribed guide RNA can be delivered to algal cells. Electroporation protocol follows standard recommended protocol from the GeneArt Chlamydomonas Engineering kit. The methods of U.S. Pat. No. 8,945,839 may be applied to the C2c1 effector protein system of the present invention. With respect to the CRISPR-C2c1 system, in some embodiments, the CRISPR-C2c1 system may recognize a PAM sequence of 5′ TTN 3′ or 5′ ATTN 3′, wherein N is any nucleotide. In some embodiments, the CRISPR-C2c1 system introduces one or more staggered double strand breaks (DSBs) to the target gene. In some embodiments, the CRISPR-C2c1 system introduces a template DNA sequence at the staggered DSB via HR or NHEJ. In some particular embodiments, the CRISPR-C2c1 system comprises a catalytically inactivated C2c1 protein associated with a functional domain that modifies the target gene. In a particular embodiment, the CRISPR-C2c1 system introduces a single mutation. In another particular embodiment, the CRISPR-C2c1 system introduces a single nucleotide modification to the transcript.

### The Use of C2c1 in the Generation of Micro-Organisms Capable of Fatty Acid Production

[1167] In particular embodiments, the methods of the invention are used for the generation of genetically engineered micro-organisms capable of the production of fatty esters, such as fatty acid methyl esters (“FAME”) and fatty acid ethyl esters (“FAEE”),

[1168] Typically, host cells can be engineered to produce fatty esters from a carbon source, such as an alcohol, present in the medium, by expression or overexpression of a gene encoding a thioesterase, a gene encoding an acyl-CoA synthase, and a gene encoding an ester synthase. Accordingly, the methods provided herein are used to modify a micro-organisms so as to overexpress or introduce a thioesterase gene, a gene encoding an acyl-CoA synthase, and a gene encoding an ester synthase. In particular embodiments, the thioesterase gene is selected from tesA, 'tesA, tesB, fatB, fatB2, fatB3, fatA1, or fatA. In particular embodiments, the gene encoding an acyl-CoA synthase is selected from fadDJadK, BH3103, pfl-4354, EAV15023, fadDl, fadD2, RPC_4074, fadDD35, fadDD22, faa39, or an identified gene encoding an enzyme having the same properties. In particular embodiments, the gene encoding an ester synthase is a gene encoding a synthase/acyl-CoA:diacylglycerl acyltransferase from Simmondsia chinensis, Acinetobacter sp. ADP, Alcanivorax borkumensis, Pseudomonas aeruginosa, Fundibacter jadensis, Arabidopsis thaliana, or Alkaligenes eutrophus, or a variant thereof.

[1169] Additionally or alternatively, the methods provided herein are used to decrease expression in said micro-organism of at least one of a gene encoding an acyl-CoA dehydrogenase, a gene encoding an outer membrane protein receptor, and a gene encoding a transcriptional regulator of fatty acid biosynthesis. In particular embodiments one or more of these genes is inactivated, such as by introduction of a mutation. In particular embodiments, the gene encoding an acyl-CoA dehydrogenase is fadE. In particular embodiments, the gene encoding a transcriptional regulator of fatty acid biosynthesis encodes a DNA transcription repressor, for example, fabR.

[1170] Additionally or alternatively, said micro-organism is modified to reduce expression of at least one of a gene encoding a pyruvate formate lyase, a gene encoding a lactate dehydrogenase, or both. In particular embodiments, the gene encoding a pyruvate formate lyase is pflB. In particular embodiments, the gene encoding a lactate dehydrogenase is IdhA. In particular embodiments one or more of these genes is inactivated, such as by introduction of a mutation therein. In some embodiments, the CRISPR-C2c1 system introduces one or more staggered double strand breaks (DSBs) with a 5′-overhang to the target gene. In particular embodiments, the 5′ overhang is 7 nt. In some embodiments, the CRISPR-C2c1 system introduces a template DNA sequence at the staggered DSB via HR or NHEJ. In some particular embodiments, the CRISPR-C2c1 system comprises a catalytically inactivated C2c1 protein associated with a functional domain that modifies the target gene. In a particular embodiment, the CRISPR-C2c1 system introduces a single mutation. In another particular embodiment, the CRISPR-C2c1 system introduces a single nucleotide modification to the transcript.

[1171] In particular embodiments, the micro-organism is selected from the genus Escherichia, Bacillus, Lactobacillus, Rhodococcus, Synechococcus, Synechoystis, Pseudomonas, Aspergillus, Trichoderma, Neurospora, Fusarium, Humicola, Rhizomucor, Kluyveromyces, Pichia, Mucor, Myceliophtora, Penicillium, Phanerochaete, Pleurotus, Trametes, Chrysosporium, Saccharomyces, Stenotrophamonas, Schizosaccharomyces, Yarrowia, or Streptomyces.

[1172] The use of C2c1 in the generation of micro-organisms capable of organic acid production

[1173] The methods provided herein are further used to engineer micro-organisms capable of organic acid production, more particularly from pentose or hexose sugars. In particular embodiments, the methods comprise introducing into a micro-organism an exogenous LDH gene. In particular embodiments, the organic acid production in said micro-organisms is additionally or alternatively increased by inactivating endogenous genes encoding proteins involved in an endogenous metabolic pathway which produces a metabolite other than the organic acid of interest and/or wherein the endogenous metabolic pathway consumes the organic acid. In particular embodiments, the modification ensures that the production of the metabolite other than the organic acid of interest is reduced. According to particular embodiments, the methods are used to introduce at least one engineered gene deletion and/or inactivation of an endogenous pathway in which the organic acid is consumed or a gene encoding a product involved in an endogenous pathway which produces a metabolite other than the organic acid of interest. In particular embodiments, the at least one engineered gene deletion or inactivation is in one or more gene encoding an enzyme selected from the group consisting of pyruvate decarboxylase (pdc), fumarate reductase, alcohol dehydrogenase (adh), acetaldehyde dehydrogenase, phosphoenolpyruvate carboxylase (ppc), D-lactate dehydrogenase (d-ldh), L-lactate dehydrogenase (1-ldh), lactate 2-monooxygenase. In further embodiments the at least one engineered gene deletion and/or inactivation is in an endogenous gene encoding pyruvate decarboxylase (pdc).

[1174] In further embodiments, the micro-organism is engineered to produce lactic acid and the at least one engineered gene deletion and/or inactivation is in an endogenous gene encoding lactate dehydrogenase. Additionally or alternatively, the micro-organism comprises at least one engineered gene deletion or inactivation of an endogenous gene encoding a cytochrome-dependent lactate dehydrogenase, such as a cytochrome B2-dependent L-lactate dehydrogenase.

### The Use of C2c1 in the Generation of Improved Xylose or Cellobiose Utilizing Yeasts Strains

[1175] In particular embodiments, the CRISPR-C2c1 system may be applied to select for improved xylose or cellobiose utilizing yeast strains. Error-prone PCR can be used to amplify one (or more) genes involved in the xylose utilization or cellobiose utilization pathways. Examples of genes involved in xylose utilization pathways and cellobiose utilization pathways may include, without limitation, those described in Ha, S. J., et al. (2011) Proc. Natl. Acad. Sci. USA 108(2):504-9 and Galazka, J. M., et al. (2010) Science 330(6000):84-6. Resulting libraries of double-stranded DNA molecules, each comprising a random mutation in such a selected gene could be co-transformed with the components of the CRISPR-C2c1 system into a yeast strain (for instance S288C) and strains can be selected with enhanced xylose or cellobiose utilization capacity, as described in WO2015138855.

### The Use of C2c1 in the Generation of Improved Yeasts Strains for Use in Isoprenoid Biosynthesis

[1176] Tadas Jakociunas et al. described the successful application of a multiplex CRISPR/Cas9 system for genome engineering of up to 5 different genomic loci in one transformation step in baker's yeast Saccharomyces cerevisiae (Metabolic Engineering Volume 28, March 2015, Pages 213-222) resulting in strains with high mevalonate production, a key intermediate for the industrially important isoprenoid biosynthesis pathway. In particular embodiments, the CRISPR-C2c1 system may be applied in a multiplex genome engineering method as described herein for identifying additional high producing yeast strains for use in isoprenoid synthesis. With regard to the C2c1 protein, in some embodiments, the CRISPR-C2c1 system may recognize a PAM sequence that is 5′ TTN 3′ or 5′ ATTN 3′, wherein N is any nucleotide. In some embodiments, the CRISPR-C2c1 system introduces one or more staggered double strand breaks (DSBs) with 7-nt 5′ overhang to the target gene. In some embodiments, the CRISPR-C2c1 system introduces a template DNA sequence at the staggered DSB via HR or NHEJ. In some particular embodiments, the CRISPR-C2c1 system comprises a catalytically inactivated C2c1 protein associated with a functional domain that modifies the target gene. In a particular embodiment, the CRISPR-C2c1 system introduces a single mutation. In another particular embodiment, the CRISPR-C2c1 system introduces a single nucleotide modification to the transcript.

### The Use of C2c1 in the Generation of Lactic Acid Producing Yeasts Strains

[1177] In another embodiment, successful application of a multiplex CRISPR-C2c1 system is encompassed. In analogy with Vratislav Stovicek et al. (Metabolic Engineering Communications, Volume 2, December 2015, Pages 13-22), improved lactic acid-producing strains can be designed and obtained in a single transformation event. In a particular embodiment, the CRISPR-C2c1 system is used for simultaneously inserting the heterologous lactate dehydrogenase gene and disruption of two endogenous genes PDC1 and PDC5 genes. With regard to the C2c1 protein, in some embodiments, the CRISPR-C2c1 system may recognize a PAM sequence that is 5′ TTN 3′ or 5′ ATTN 3′, wherein N is any nucleotide. In some embodiments, the CRISPR-C2c1 system introduces one or more staggered double strand breaks (DSBs) with a 5′ overhang to the target gene. In particular embodiments, the 5′ overhang is 7 nt. In some embodiments, the CRISPR-C2c1 system introduces a template DNA sequence at the staggered DSB via HR or NHEJ. In some particular embodiments, the CRISPR-C2c1 system comprises a catalytically inactivated C2c1 protein associated with a functional domain that modifies the target gene. In a particular embodiment, the CRISPR-C2c1 system introduces a single mutation to the PDC1 or PD5 gene. In another particular embodiment, the CRISPR-C2c1 system introduces a single nucleotide modification to the transcript of the PDC1 or PDC5 gene.

### Further Applications of the CRISPR-C2c1 System in Plants

[1178] In particular embodiments, the CRISPR system, and preferably the CRISPR-C2c1 system described herein, can be used for visualization of genetic element dynamics. For example, CRISPR imaging can visualize either repetitive or non-repetitive genomic sequences, report telomere length change and telomere movements and monitor the dynamics of gene loci throughout the cell cycle (Chen et al., Cell, 2013). These methods may also be applied to plants.

[1179] Other applications of the CRISPR system, and preferably the CRISPR-C2c1 system described herein, is the targeted gene disruption positive-selection screening in vitro and in vivo (Malina et al., Genes and Development, 2013). These methods may also be applied to plants.

[1180] In particular embodiments, fusion of inactive C2c1 endonucleases with histone-modifying enzymes can introduce custom changes in the complex epigenome (Rusk et al., Nature Methods, 2014). These methods may also be applied to plants.

[1181] In particular embodiments, the CRISPR system, and preferably the CRISPR-C2c1 system described herein, can be used to purify a specific portion of the chromatin and identify the associated proteins, thus elucidating their regulatory roles in transcription (Waldrip et al., Epigenetics, 2014). These methods may also be applied to plants.

[1182] In particular embodiments, present invention can be used as a therapy for virus removal in plant systems as it is able to cleave both viral DNA and RNA. Previous studies in human systems have demonstrated the success of utilizing CRISPR in targeting the single strand RNA virus, hepatitis C (A. Price, et al., Proc. Natl. Acad. Sci, 2015) as well as the double stranded DNA virus, hepatitis B (V. Ramanan, et al., Sci. Rep, 2015). These methods may also be adapted for using the CRISPR-C2c1 system in plants.

[1183] In particular embodiments, present invention could be used to alter genome complexity. In further particular embodiment, the CRISPR system, and preferably the CRISPR-C2c1 system described herein, can be used to disrupt or alter chromosome number and generate haploid plants, which only contain chromosomes from one parent. Such plants can be induced to undergo chromosome duplication and converted into diploid plants containing only homozygous alleles (Karimi-Ashtiyani et al., PNAS, 2015; Anton et al., Nucleus, 2014). These methods may also be applied to plants.

[1184] In particular embodiments, the CRISPR-C2c1 system described herein, can be used for self-cleavage. In these embodiments, the promotor of the C2c1 enzyme and gRNA can be a constitutive promotor and a second gRNA is introduced in the same transformation cassette, but controlled by an inducible promoter. This second gRNA can be designated to induce site-specific cleavage in the C2c1 gene in order to create a non-functional C2c1. In a further particular embodiment, the second gRNA induces cleavage on both ends of the transformation cassette, resulting in the removal of the cassette from the host genome. This system offers a controlled duration of cellular exposure to the Cas enzyme and further minimizes off-target editing. Furthermore, cleavage of both ends of a CRISPR/Cas cassette can be used to generate transgene-free TO plants with bi-allelic mutations (as described for Cas9 e.g. Moore et al., Nucleic Acids Research, 2014; Schaeffer et al., Plant Science, 2015). The methods of Moore et al. may be applied to the CRISPR-C2c1 systems described herein.

[1185] Sugano et al. (Plant Cell Physiol. 2014 March; 55(3):475-81. doi: 10.1093/pcp/pcu014. Epub 2014 Jan. 18) reports the application of CRISPR-Cas9 to targeted mutagenesis in the liverwort Marchantia polymorpha L., which has emerged as a model species for studying land plant evolution. The U6 promoter of M. polymorpha was identified and cloned to express the gRNA. The target sequence of the gRNA was designed to disrupt the gene encoding auxin response factor 1 (ARF1) in M. polymorpha. Using Agrobacterium-mediated transformation, Sugano et al. isolated stable mutants in the gametophyte generation of M. polymorpha. CRISPR-Cas9-based site-directed mutagenesis in vivo was achieved using either the Cauliflower mosaic virus 35S or M. polymorpha EF1α promoter to express Cas9. Isolated mutant individuals showing an auxin-resistant phenotype were not chimeric. Moreover, stable mutants were produced by asexual reproduction of T1 plants. Multiple arf1 alleles were easily established using CRIPSR-Cas9-based targeted mutagenesis. The methods of Sugano et al. may be applied to the C2c1 effector protein system of the present invention.

[1186] Kabadi et al. (Nucleic Acids Res. 2014 Oct. 29; 42(19):e147. doi: 10.1093/nar/gku749. Epub 2014 Aug. 13) developed a single lentiviral system to express a Cas9 variant, a reporter gene and up to four sgRNAs from independent RNA polymerase III promoters that are incorporated into the vector by a convenient Golden Gate cloning method. Each sgRNA was efficiently expressed and can mediate multiplex gene editing and sustained transcriptional activation in immortalized and primary human cells. The methods of Kabadi et al. may be applied to the C2c1 effector protein system of the present invention.

[1187] Ling et al. (BMC Plant Biology 2014, 14:327) developed a CRISPR-Cas9 binary vector set based on the pGreen or pCAMBIA backbone, as well as a gRNA This toolkit requires no restriction enzymes besides BsaI to generate final constructs harboring maize-codon optimized Cas9 and one or more gRNAs with high efficiency in as little as one cloning step. The toolkit was validated using maize protoplasts, transgenic maize lines, and transgenic Arabidopsis lines and was shown to exhibit high efficiency and specificity. More importantly, using this toolkit, targeted mutations of three Arabidopsis genes were detected in transgenic seedlings of the T1 generation. Moreover, the multiple-gene mutations could be inherited by the next generation. (guide RNA)module vector set, as a toolkit for multiplex genome editing in plants. The toolbox of Lin et al. may be applied to the C2c1 effector protein system of the present invention.

[1188] Protocols for targeted plant genome editing via CRISPR-C2c1 are also available based on those disclosed for the CRISPR-Cas9 system in volume 1284 of the series Methods in Molecular Biology pp 239-255 10 Feb. 2015. A detailed procedure to design, construct, and evaluate dual gRNAs for plant codon optimized Cas9 (pcoCas9) mediated genome editing using Arabidopsis thaliana and Nicotiana benthamiana protoplasts s model cellular systems are described. Strategies to apply the CRISPR-Cas9 system to generating targeted genome modifications in whole plants are also discussed. The protocols described in the chapter may be applied to the C2c1 effector protein system of the present invention.

[1189] With respect to the C2c1 protein in the above mentioned methods and protocols, the CRISPR-C2c1 system may recognize a PAM sequence that is 5′ TTN 3′ or 5′ ATTN 3′, wherein N is any nucleotide. In some embodiments, the CRISPR-C2c1 system introduces one or more staggered double strand breaks (DSBs) with a 5′ overhang to the target gene. In particular embodiments, the 5′ overhang is 7 nt. In some embodiments, the CRISPR-C2c1 system introduces a template DNA sequence at the staggered DSB via HR or NHEJ. In some particular embodiments, the CRISPR-C2c1 system comprises a catalytically inactivated C2c1 protein associated with a functional domain that modifies the target gene. In a particular embodiment, the CRISPR-C2c1 system introduces a single mutation. In another particular embodiment, the CRISPR-C2c1 system introduces a single nucleotide modification to the transcript.

[1190] Ma et al. (Mol Plant. 2015 Aug. 3; 8(8):1274-84. doi: 10.1016/j.molp.2015.04.007) reports robust CRISPR-Cas9 vector system, utilizing a plant codon optimized Cas9 gene, for convenient and high-efficiency multiplex genome editing in monocot and dicot plants. Ma et al. designed PCR-based procedures to rapidly generate multiple sgRNA expression cassettes, which can be assembled into the binary CRISPR-Cas9 vectors in one round of cloning by Golden Gate ligation or Gibson Assembly. With this system, Ma et al. edited 46 target sites in rice with an average 85.4% rate of mutation, mostly in biallelic and homozygous status. Ma et al. provide examples of loss-of-function gene mutations in TO rice and T1Arabidopsis plants by simultaneous targeting of multiple (up to eight) members of a gene family, multiple genes in a biosynthetic pathway, or multiple sites in a single gene. The methods of Ma et al. may be applied to the C2c1 effector protein system of the present invention. With respect to the C2c1 protein, the CRISPR-C2c1 system may recognize a PAM sequence that is 5′ TTN 3′ or 5′ ATTN 3′, wherein N is any nucleotide. In some embodiments, the CRISPR-C2c1 system introduces one or more staggered double strand breaks (DSBs) with a 5′ overhang to the target gene. In particular embodiments, the 5′ overhang is 7 nt. In some embodiments, the CRISPR-C2c1 system introduces a template DNA sequence at the staggered DSB via HR or NHEJ. In some particular embodiments, the CRISPR-C2c1 system comprises a catalytically inactivated C2c1 protein associated with a functional domain that modifies the target gene. In a particular embodiment, the CRISPR-C2c1 system introduces a single mutation. In another particular embodiment, the CRISPR-C2c1 system introduces a single nucleotide modification to the transcript.

[1191] Lowder et al. (Plant Physiol. 2015 Aug. 21. pii: pp. 00636.2015) also developed a CRISPR-Cas9 toolbox enables multiplex genome editing and transcriptional regulation of expressed, silenced or non-coding genes in plants. This toolbox provides researchers with a protocol and reagents to quickly and efficiently assemble functional CRISPR-Cas9 T-DNA constructs for monocots and dicots using Golden Gate and Gateway cloning methods. It comes with a full suite of capabilities, including multiplexed gene editing and transcriptional activation or repression of plant endogenous genes. T-DNA based transformation technology is fundamental to modern plant biotechnology, genetics, molecular biology and physiology. As such, C2c1 (WT, nickase or dC2c1) and gRNA(s) may be assembled into a T-DNA destination-vector of interest. The assembly method is based on both Golden Gate assembly and MultiSite Gateway recombination. Three modules are required for assembly. The first module is a C2c1 entry vector, which contains promoterless C2c1 or its derivative genes flanked by attL1 and attR5 sites. The second module is a gRNA entry vector which contains entry gRNA expression cassettes flanked by attL5 and attL2 sites. The third module includes attR1-attR2-containing destination T-DNA vectors that provide promoters of choice for C2c1 expression. The toolbox of Lowder et al. may be applied to the C2c1 effector protein system of the present invention. With respect to the C2c1 protein, the CRISPR-C2c1 system may recognize a PAM sequence that is 5′ TTN 3′ or 5′ ATTN 3′, wherein N is any nucleotide. In some embodiments, the CRISPR-C2c1 system introduces one or more staggered double strand breaks (DSBs) with a 5′ overhang to the target gene. In particular embodiments, the 5′ overhang is 7 nt. In some embodiments, the CRISPR-C2c1 system introduces a template DNA sequence at the staggered DSB via HR or NHEJ. In some particular embodiments, the CRISPR-C2c1 system comprises a catalytically inactivated C2c1 protein associated with a functional domain that modifies the target gene. In a particular embodiment, the CRISPR-C2c1 system introduces a single mutation. In another particular embodiment, the CRISPR-C2c1 system introduces a single nucleotide modification to the transcript.

[1192] Wang et al. (bioRxiv 051342; doi: doi.org/10.1101/051342; Epub. May 12, 2016) demonstrate editing of homoeologous copies of four genes affecting important agronomic traits in hexaploid wheat using a multiplexed gene editing construct with several gRNA-tRNA units under the control of a single promoter.

[1193] In an advantageous embodiment, the plant may be a tree. The present invention may also utilize the herein disclosed CRISPR Cas system for herbaceous systems (see, e.g., Belhaj et al., Plant Methods 9: 39 and Harrison et al., Genes & Development 28: 1859-1872). In a particularly advantageous embodiment, the CRISPR Cas system of the present invention may target single nucleotide polymorphisms (SNPs) in trees (see, e.g., Zhou et al., New Phytologist, Volume 208, Issue 2, pages 298-301, October 2015). In the Zhou et al. study, the authors applied a CRISPR Cas system in the woody perennial Populus using the 4-coumarate:CoA ligase (4CL) gene family as a case study and achieved 100% mutational efficiency for two 4CL genes targeted, with every transformant examined carrying biallelic modifications. In the Zhou et al., study, the CRISPR-Cas9 system was highly sensitive to single nucleotide polymorphisms (SNPs), as cleavage for a third 4CL gene was abolished due to SNPs in the target sequence. These methods may be applied to the C2c1 effector protein system of the present invention. With respect to the C2c1 protein, the CRISPR-C2c1 system may recognize a PAM sequence that is 5′ TTN 3′ or 5′ ATTN 3′, wherein N is any nucleotide. In some embodiments, the CRISPR-C2c1 system introduces one or more staggered double strand breaks (DSBs) with a 5′ overhang to the target gene. In particular embodiments, the 5′ overhang is 7 nt. In some embodiments, the CRISPR-C2c1 system introduces a template DNA sequence at the staggered DSB via HR or NHEJ. In some particular embodiments, the CRISPR-C2c1 system comprises a catalytically inactivated C2c1 protein associated with a functional domain that modifies the target gene. In a particular embodiment, the CRISPR-C2c1 system introduces a single mutation. In another particular embodiment, the CRISPR-C2c1 system introduces a single nucleotide modification to the transcript.

[1194] The methods of Zhou et al. (New Phytologist, Volume 208, Issue 2, pages 298-301, October 2015) may be applied to the present invention as follows. Two 4CL genes, 4CL1 and 4CL2, associated with lignin and flavonoid biosynthesis, respectively are targeted for CRISPR-Cas9 editing. The Populus tremula×alba clone 717-1B4 routinely used for transformation is divergent from the genome-sequenced Populus trichocarpa. Therefore, the 4CL1 and 4CL2 gRNAs designed from the reference genome are interrogated with in-house 717 RNA-Seq data to ensure the absence of SNPs which could limit Cas efficiency. A third gRNA designed for 4CL5, a genome duplicate of 4CL1, is also included. The corresponding 717 sequence harbors one SNP in each allele near/within the PAM, both of which are expected to abolish targeting by the 4CL5-gRNA. All three gRNA target sites are located within the first exon. For 717 transformation, the gRNA is expressed from the Medicago U6.6 promoter, along with a human codon-optimized Cas under control of the CaMV 35S promoter in a binary vector. Transformation with the Cas-only vector can serve as a control. Randomly selected 4CL1 and 4CL2 lines are subjected to amplicon-sequencing. The data is then processed and biallelic mutations are confirmed in all cases. These methods may be applied to the C2c1 effector protein system of the present invention. With respect to the C2c1 protein, the CRISPR-C2c1 system may recognize a PAM sequence that is 5′ TTN 3′ or 5′ ATTN 3′, wherein N is any nucleotide. In some embodiments, the CRISPR-C2c1 system introduces one or more staggered double strand breaks (DSBs) with a 5′ overhang to the target gene. In particular embodiments, the 5′ overhang is 7 nt. In some embodiments, the CRISPR-C2c1 system introduces a template DNA sequence at the staggered DSB via HR or NHEJ. In some particular embodiments, the CRISPR-C2c1 system comprises a catalytically inactivated C2c1 protein associated with a functional domain that modifies the target gene. In a particular embodiment, the CRISPR-C2c1 system introduces a single mutation. In another particular embodiment, the CRISPR-C2c1 system introduces a single nucleotide modification to the transcript.

[1195] In plants, pathogens are often host-specific. For example, Fusarium oxysporum f. sp. lycopersici causes tomato wilt but attacks only tomato, and F. oxysporum f. dianthii Puccinia graminis f. sp. tritici attacks only wheat. Plants have existing and induced defenses to resist most pathogens. Mutations and recombination events across plant generations lead to genetic variability that gives rise to susceptibility, especially as pathogens reproduce with more frequency than plants. In plants there can be non-host resistance, e.g., the host and pathogen are incompatible. There can also be Horizontal Resistance, e.g., partial resistance against all races of a pathogen, typically controlled by many genes and Vertical Resistance, e.g., complete resistance to some races of a pathogen but not to other races, typically controlled by a few genes. In a Gene-for-Gene level, plants and pathogens evolve together, and the genetic changes in one balance changes in other. Accordingly, using Natural Variability, breeders combine most useful genes for Yield, Quality, Uniformity, Hardiness, Resistance. The sources of resistance genes include native or foreign Varieties, Heirloom Varieties, Wild Plant Relatives, and Induced Mutations, e.g., treating plant material with mutagenic agents. Using the present invention, plant breeders are provided with a new tool to induce mutations. Accordingly, one skilled in the art can analyze the genome of sources of resistance genes, and in Varieties having desired characteristics or traits employ the present invention to induce the rise of resistance genes, with more precision than previous mutagenic agents and hence accelerate and improve plant breeding programs.

[1196] The following table provides additional references and related fields for which the CRISPR-Cas complexes, modified effector proteins, systems, and methods of optimization may be used to improve bioproduction. In some embodiments, the CRISPR-Cas complex comprises a C2c1 protein or catalytic domain thereof complexed with a tracr RNA, a guide RNA comprising a guide sequence linked to a direct repeat, wherein the guide sequence hybridizes with the target sequence. With respect to the C2c1 protein, the CRISPR-C2c1 system may recognize a PAM sequence that is 5′ TTN 3′ or 5′ ATTN 3′, wherein N is any nucleotide. In some embodiments, the CRISPR-C2c1 system introduces one or more staggered double strand breaks (DSBs) with a 5′ overhang to the target gene. In particular embodiments, the 5′ overhang is 7 nt. In some embodiments, the CRISPR-C2c1 system introduces a template DNA sequence at the staggered DSB via HR or NHEJ. In some particular embodiments, the CRISPR-C2c1 system comprises a catalytically inactivated C2c1 protein associated with a functional domain that modifies the target gene. In a particular embodiment, the CRISPR-C2c1 system introduces a single mutation. In another particular embodiment, the CRISPR-C2c1 system introduces a single nucleotide modification to the transcript.

| | | |
|---|---|---|
| Feb. 17, 2014 | PCT/US15/63434 | Compositions and methods for efficient gene editing in |
| | (WO2016/099887) | E. coli using guide RNA/Cas endonuclease systems in |
| | | combination with circular polynucleotide modification |
| | | templates. |
| Aug. 13, 2014 | PCT/US15/41256 | Genetic targeting in non-conventional yeast using an |
| | (WO2016/025131) | RNA-guided endonuclease. |
| Nov. 6, 2014 | PCT/US15/58760 | Peptide-mediated delivery of RNA-guided endonuclease |
| | (WO2016/073433) | into cells. |
| Oct. 12, 2015 | PCT/US16/56404 | Protected DNA templates for gene modification and |
| | (WO2017/066175) | increased homologous recombination in cells and methods |
| | | of use. |
| Dec. 11, 2015 | PCT/US16/65070 | Methods and compositions for enhanced nuclease- |
| | (WO2017/100158) | mediated genome modification and reduced off-target site |
| | | effects. |
| Dec. 18, 2015 | PCT/US16/65537 | Methods and compositions for T-RNA based guide RNA |
| | (WO2017/105991) | expression. |
| Dec. 18, 2015 | PCT/US16/66772 | Methods and compositions for polymerase II (Pol-II) |
| | (WO2017/106414) | based guide RNA expression. |
| Dec. 16, 2014 | PCT/US15/65693 | Fungal genome modification systems and methods of use. |
| | (WO2016/100272) | |
| Dec. 16, 2014 | PCT/US15/66195 | Fungal genome modification systems and methods of use |
| | (WO2016/100571) | |
| Dec. 16, 2014 | PCT/US15/66192 | Fungal genome modification systems and methods of use. |
| | (WO2016/100568) | |
| Dec. 16, 2014 | PCT/US15/66178 | Use of a helper strain with silenced NHEJ to improve |
| | (WO2016/100562) | homologous integration of targeted DNA cassettes |
| | | in Trichoderma reesei. |
| Jul. 28, 2015 | PCT/US16/44489 | Genome editing systems and methods of use. |
| | (WO2017/019867) | |

### Improved Plants and Yeast Cells

[1197] The present invention also provides plants and yeast cells obtainable and obtained by the methods provided herein. The improved plants obtained by the methods described herein may be useful in food or feed production through expression of genes which, for instance ensure tolerance to plant pests, herbicides, drought, low or high temperatures, excessive water, etc.

[1198] The improved plants obtained by the methods described herein, especially crops and algae may be useful in food or feed production through expression of, for instance, higher protein, carbohydrate, nutrient or vitamin levels than would normally be seen in the wildtype. In this regard, improved plants, especially pulses and tubers are preferred.

[1199] Improved algae or other plants such as rape may be particularly useful in the production of vegetable oils or biofuels such as alcohols (especially methanol and ethanol), for instance. These may be engineered to express or overexpress high levels of oil or alcohols for use in the oil or biofuel industries.

[1200] The invention also provides for improved parts of a plant. Plant parts include, but are not limited to, leaves, stems, roots, tubers, seeds, endosperm, ovule, and pollen. Plant parts as envisaged herein may be viable, nonviable, regeneratable, and/or non-regeneratable.

[1201] In one embodiment, the method described in Soyk et al. (Nat Genet. 2017 January; 49(1):162-168), which used CRISPR-Cas9 mediated mutation targeting flowering repressor SP5G in tomatoes to produce early yield tomatoes may be modified for the CRISPR-Cas system as disclosed in this invention. In some embodiments, the CRISPR protein is a C2c1, and the system comprises: I. a CRISPR-Cas system RNA polynucleotide sequence, wherein the polynucleotide sequence comprises: (a) a guide RNA polynucleotide capable of hybridizing to a target sequence, and (b) a direct repeat RNA polynucleotide, and II. a polynucleotide sequence encoding the C2c1, optionally comprising at least one or more nuclear localization sequences, wherein the direct repeat sequence hybridizes to the guide sequence and directs sequence-specific binding of a CRISPR complex to the target sequence, and wherein the CRISPR complex comprises the CRISPR protein complexed with (1) the guide sequence that is hybridized or hybridizable to the target sequence, and (2) the direct repeat sequence, and the polynucleotide sequence encoding a CRISPR protein is DNA or RNA. In some embodiments, the plant cell genome comprises T-rich PAMs. In particular embodiments, the PAM is 5′-TTN-3′ or 5′-ATTN-3′. In a particular embodiment, the PAM is 5′-TTG-3′. In some embodiments, the CRISPR effector protein is a C2c1 protein. C2c1 creates double strand breaks at the distal end of PAM, in contrast to cleavage at the proximal end of PAM created by Cas9 (Jinek et al., 2012; Cong et al., 2013). It is proposed that Cpf1 mutated target sequences may be susceptible to repeated cleavage by a single gRNA, hence promoting Cpf1's application in HDR mediated genome editing (Front Plant Sci. 2016 Nov. 14; 7:1683). Cpf1 and C2c1 are both Type V CRISPR Cas proteins that share structure similarity. Like C2c1, Cpf1 creates staggered double strand breaks at the distal end of PAM (in contrast to Cas9, which creates blunt cut at the proximal end of PAM). Accordingly, in certain embodiments, the locus of interest is modified by the CRISPR-C2c1 complex via homology directed repair (HR or HDR). In certain embodiments, the locus of interest is modified by the CRISPR-C2c1 complex independent of HR. In certain embodiments, the locus of interest is modified by the CRISPR-C2c1 complex via non-homologous end joining (NHEJ).

[1202] It is also encompassed herein to provide plant cells and plants generated according to the methods of the invention. Gametes, seeds, embryos, either zygotic or somatic, progeny or hybrids of plants comprising the genetic modification, which are produced by traditional breeding methods, are also included within the scope of the present invention. Such plants may contain a heterologous or foreign DNA sequence inserted at or instead of a target sequence. Alternatively, such plants may contain only an alteration (mutation, deletion, insertion, substitution) in one or more nucleotides. As such, such plants will only be different from their progenitor plants by the presence of the particular modification.

[1203] Thus, the invention provides a plant, animal or cell, produced by the present methods, or a progeny thereof. The progeny may be a clone of the produced plant or animal, or may result from sexual reproduction by crossing with other individuals of the same species to introgress further desirable traits into their offspring. The cell may be in vivo or ex vivo in the cases of multicellular organisms, particularly animals or plants.

[1204] The methods for genome editing using the C2c1 system as described herein can be used to confer desired traits on essentially any plant, algae, fungus, yeast, etc. A wide variety of plants, algae, fungus, yeast, etc and plant algae, fungus, yeast cell or tissue systems may be engineered for the desired physiological and agronomic characteristics described herein using the nucleic acid constructs of the present disclosure and the various transformation methods mentioned above.

[1205] In particular embodiments, the methods described herein are used to modify endogenous genes or to modify their expression without the permanent introduction into the genome of the plant, algae, fungus, yeast, etc of any foreign gene, including those encoding CRISPR components, so as to avoid the presence of foreign DNA in the genome of the plant. This can be of interest as the regulatory requirements for non-transgenic plants are less rigorous. In some particular embodiments, the CRISPR-C2c1 system comprises a catalytically inactivated C2c1 protein associated with a functional domain that modifies the target gene. In a particular embodiment, the functional domain comprises a deaminase, preferably an adenosine deaminase. In another particular embodiment, the CRISPR-C2c1 system introduces a single nucleotide modification to the transcript.

[1206] The CRISPR systems provided herein can be used to introduce targeted double-strand or single-strand breaks and/or to introduce gene activator and or repressor systems and without being limitative, can be used for gene targeting, gene replacement, targeted mutagenesis, targeted deletions or insertions, targeted inversions and/or targeted translocations. By co-expression of multiple targeting RNAs directed to achieve multiple modifications in a single cell, multiplexed genome modification can be ensured. This technology can be used to high-precision engineering of plants with improved characteristics, including enhanced nutritional quality, increased resistance to diseases and resistance to biotic and abiotic stress, and increased production of commercially valuable plant products or heterologous compounds.

[1207] The methods described herein generally result in the generation of “improved plants, algae, fungi, yeast, etc” in that they have one or more desirable traits compared to the wildtype plant. In particular embodiments, the plants, algae, fungi, yeast, etc., cells or parts obtained are transgenic plants, comprising an exogenous DNA sequence incorporated into the genome of all or part of the cells. In particular embodiments, non-transgenic genetically modified plants, algae, fungi, yeast, etc., parts or cells are obtained, in that no exogenous DNA sequence is incorporated into the genome of any of the cells of the plant. In such embodiments, the improved plants, algae, fungi, yeast, etc. are non-transgenic. Where only the modification of an endogenous gene is ensured and no foreign genes are introduced or maintained in the plant, algae, fungi, yeast, etc. genome, the resulting genetically modified crops contain no foreign genes and can thus basically be considered non-transgenic. The different applications of the CRISPR-C2c1 system for plant, algae, fungi, yeast, etc. genome editing include, but are not limited to: introduction of one or more foreign genes to confer an agricultural trait of interest; editing of endogenous genes to confer an agricultural trait of interest; modulating of endogenous genes by the CRISPR-C2c1 system to confer an agricultural trait of interest. Because the C2c1 protein creates staggered double strand breaks (DSBs) at the target site, exogenous DNA sequence may be introduced, or knocked-in with or without homology directed repair (HR) (for example, via NHEJ). Exemplary genes conferring agronomic traits include, but are not limited to genes that confer resistance to pests or diseases; genes involved in plant diseases, such as those listed in WO 2013046247; genes that confer resistance to herbicides, fungicides, or the like; genes involved in (abiotic) stress tolerance. Other aspects of the use of the CRISPR-Cas system include, but are not limited to: create (male) sterile plants; increasing the fertility stage in plants/algae etc; generate genetic variation in a crop of interest; affect fruit-ripening; increasing storage life of plants/algae etc.; reducing allergen in plants/algae etc.; ensure a value added trait (e.g. nutritional improvement); Screening methods for endogenous genes of interest; biofuel, fatty acid, organic acid, etc. production. C2c1 effector protein complexes can be used in non-animal organisms, such as plants, algae, fungi, yeasts, etc.

[1208] The methods for genome editing using the C2c1 system as described herein can be used to confer desired traits on essentially any plant, algae, fungus, yeast, etc. A wide variety of plants, algae, fungus, yeast, etc and plant algae, fungus, yeast cell or tissue systems may be engineered for the desired physiological and agronomic characteristics described herein using the nucleic acid constructs of the present disclosure and the various transformation methods mentioned above.

[1209] An anti-browning white button mushroom (Aaricus bisporus) strain was developed by introducing 1-14 nt deletions into polyphenol oxidase gene with a CRISPR-Cas9 system comprising a guide RNA and a Cas9 protein, delivered to the mushroom cells via PEG transformation. See Yang et al. (news.psu.edu/story/432734/2016/10/19/academics/penn-state-developer-gene-edited-mushroom-wins-best-whats-new). The CRISPR-C2c1 system as described herein may be used with the method of Yang et al. With respect to the C2c1 protein, the CRISPR-C2c1 system recognizes a PAM sequence that is T-rich. In some embodiments, the PAM is 5′ TTN 3′ or 5′ ATTN 3′, wherein N is any nucleotide. In some embodiments, the CRISPR-C2c1 system introduces one or more staggered double strand breaks (DSBs) with a 5′ overhang. In particular embodiments, the 5′ overhang is 7 nt. In some embodiments, the CRISPR-C2c1 system introduces an exogenous template DNA sequence at the staggered DSB via HR or NHEJ. In preferred embodiments, the CRISPR-C2c1 system introduces an exogenous template DNA sequence at the staggered DSB via NHEJ. In some embodiments, the C2c1 effector protein comprises one or more mutations. In some embodiments, the C2c1 effector protein is a nickase. In some particular embodiments, the CRISPR-C2c1 system comprises a catalytically inactivated C2c1 protein associated with a functional domain that modifies the target locus of interest. In particular embodiments, the methods described herein are used to modify endogenous genes or to modify their expression without the permanent introduction into the genome of the plant, algae, fungus, yeast, etc of any foreign gene, including those encoding CRISPR components, so as to avoid the presence of foreign DNA in the genome of the plant. This can be of interest as the regulatory requirements for non-transgenic plants are less rigorous.

[1210] The CRISPR systems provided herein can be used to introduce targeted double-strand or single-strand breaks and/or to introduce gene activator and or repressor systems and without being limitative, can be used for gene targeting, gene replacement, targeted mutagenesis, targeted deletions or insertions, targeted inversions and/or targeted translocations. By co-expression of multiple targeting RNAs directed to achieve multiple modifications in a single cell, multiplexed genome modification can be ensured. This technology can be used to high-precision engineering of plants with improved characteristics, including enhanced nutritional quality, increased resistance to diseases and resistance to biotic and abiotic stress, and increased production of commercially valuable plant products or heterologous compounds.

[1211] The methods described herein generally result in the generation of “improved plants, algae, fungi, yeast, etc” in that they have one or more desirable traits compared to the wildtype plant. In particular embodiments, the plants, algae, fungi, yeast, etc., cells or parts obtained are transgenic plants, comprising an exogenous DNA sequence incorporated into the genome of all or part of the cells. In particular embodiments, non-transgenic genetically modified plants, algae, fungi, yeast, etc., parts or cells are obtained, in that no exogenous DNA sequence is incorporated into the genome of any of the cells of the plant. In such embodiments, the improved plants, algae, fungi, yeast, etc. are non-transgenic. Where only the modification of an endogenous gene is ensured and no foreign genes are introduced or maintained in the plant, algae, fungi, yeast, etc. genome, the resulting genetically modified crops contain no foreign genes and can thus basically be considered non-transgenic. The different applications of the CRISPR-C2c1 system for plant, algae, fungi, yeast, etc. genome editing include, but are not limited to: introduction of one or more foreign genes to confer an agricultural trait of interest; editing of endogenous genes to confer an agricultural trait of interest; modulating of endogenous genes by the CRISPR-C2c1 system to confer an agricultural trait of interest. Exemplary genes conferring agronomic traits include, but are not limited to genes that confer resistance to pests or diseases; genes involved in plant diseases, such as those listed in WO 2013046247; genes that confer resistance to herbicides, fungicides, or the like; genes involved in (abiotic) stress tolerance. Other aspects of the use of the CRISPR-Cas system include, but are not limited to: create (male) sterile plants; increasing the fertility stage in plants/algae etc; generate genetic variation in a crop of interest; affect fruit-ripening; increasing storage life of plants/algae etc; reducing allergen in plants/algae etc; ensure a value added trait (e.g. nutritional improvement); Screening methods for endogenous genes of interest; biofuel, fatty acid, organic acid, etc production.

### Applications in Non-Human Animals

[1212] In an aspect, the invention provides a non-human eukaryotic organism; preferably a multicellular eukaryotic organism, comprising a eukaryotic host cell according to any of the described embodiments. In other aspects, the invention provides a eukaryotic organism; preferably a multicellular eukaryotic organism, comprising a eukaryotic host cell according to any of the described embodiments. The organism in some embodiments of these aspects may be an animal; for example a mammal. Also, the organism may be an arthropod such as an insect. The present invention may also be extended to other agricultural applications such as, for example, farm and production animals. For example, pigs have many features that make them attractive as biomedical models, especially in regenerative medicine. In particular, pigs with severe combined immunodeficiency (SCID) may provide useful models for regenerative medicine, xenotransplantation (discussed also elsewhere herein), and tumor development and will aid in developing therapies for human SCID patients. Lee et al., (Proc Natl Acad Sci USA. 2014 May 20; 111(20):7260-5) utilized a reporter-guided transcription activator-like effector nuclease (TALEN) system to generated targeted modifications of recombination activating gene (RAG) 2 in somatic cells at high efficiency, including some that affected both alleles. The C2c1 effector protein may be applied to a similar system. With respect to the C2c1 protein, the CRISPR-C2c1 system may recognize a PAM sequence that is 5′ TTN 3′ or 5′ ATTN 3′, wherein N is any nucleotide. In some embodiments, the CRISPR-C2c1 system introduces one or more staggered double strand breaks (DSBs) with a 5′ overhang to the target gene. In particular embodiments, the 5′ overhang is 7 nt. In some embodiments, the CRISPR-C2c1 system introduces a template DNA sequence at the staggered DSB via HR or NHEJ. In some particular embodiments, the CRISPR-C2c1 system comprises a catalytically inactivated C2c1 protein associated with a functional domain that modifies the target gene. In a particular embodiment, the CRISPR-C2c1 system introduces a single mutation. In another particular embodiment, the CRISPR-C2c1 system introduces a single nucleotide modification to the transcript.

[1213] The methods of Lee et al., (Proc Natl Acad Sci USA. 2014 May 20; 111(20):7260-5) may be applied to the present invention analogously as follows. Mutated pigs are produced by targeted modification of RAG2 in fetal fibroblast cells followed by SCNT and embryo transfer. Constructs coding for CRISPR Cas and a reporter are electroporated into fetal-derived fibroblast cells. After 48 h, transfected cells expressing the green fluorescent protein are sorted into individual wells of a 96-well plate at an estimated dilution of a single cell per well. Targeted modification of RAG2 are screened by amplifying a genomic DNA fragment flanking any CRISPR Cas cutting sites followed by sequencing the PCR products. After screening and ensuring lack of off-site mutations, cells carrying targeted modification of RAG2 are used for SCNT. The polar body, along with a portion of the adjacent cytoplasm of oocyte, presumably containing the metaphase II plate, are removed, and a donor cell are placed in the perivitelline. The reconstructed embryos are then electrically porated to fuse the donor cell with the oocyte and then chemically activated. The activated embryos are incubated in Porcine Zygote Medium 3 (PZM3) with 0.5 μM Scriptaid (57817; Sigma-Aldrich) for 14-16 h. Embryos are then washed to remove the Scriptaid and cultured in PZM3 until they were transferred into the oviducts of surrogate pigs. The C2c1 effector protein may be applied to a similar system. With respect to the C2c1 protein, the CRISPR-C2c1 system may recognize a PAM sequence that is 5′ TTN 3′ or 5′ ATTN 3′, wherein N is any nucleotide. In some embodiments, the CRISPR-C2c1 system introduces one or more staggered double strand breaks (DSBs) with a 5′ overhang to the target gene. In particular embodiments, the 5′ overhang is 7 nt. In some embodiments, the CRISPR-C2c1 system introduces a template DNA sequence at the staggered DSB via HR or NHEJ. In some particular embodiments, the CRISPR-C2c1 system comprises a catalytically inactivated C2c1 protein associated with a functional domain that modifies the target gene. In a particular embodiment, the CRISPR-C2c1 system introduces a single mutation. In another particular embodiment, the CRISPR-C2c1 system introduces a single nucleotide modification to the transcript.

[1214] The present invention is used to create a platform to model a disease or disorder of an animal, in some embodiments a mammal, in some embodiments a human. In certain embodiments, such models and platforms are rodent based, in non-limiting examples rat or mouse. Such models and platforms can take advantage of distinctions among and comparisons between inbred rodent strains. In certain embodiments, such models and platforms primate, horse, cattle, sheep, goat, swine, dog, cat or bird-based, for example to directly model diseases and disorders of such animals or to create modified and/or improved lines of such animals. Advantageously, in certain embodiments, an animal based platform or model is created to mimic a human disease or disorder. For example, the similarities of swine to humans make swine an ideal platform for modeling human diseases. Compared to rodent models, development of swine models has been costly and time intensive. On the other hand, swine and other animals are much more similar to humans genetically, anatomically, physiologically and pathophysiologically. The present invention provides a high efficiency platform for targeted gene and genome editing, gene and genome modification and gene and genome regulation to be used in such animal platforms and models. Though ethical standards block development of human models and in many cases models based on non-human primates, the present invention is used with in vitro systems, including but not limited to cell culture systems, three dimensional models and systems, and organoids to mimic, model, and investigate genetics, anatomy, physiology and pathophysiology of structures, organs, and systems of humans. The platforms and models provide manipulation of single or multiple targets.

[1215] In certain embodiments, the present invention is applicable to disease models like that of Schomberg et al. (FASEB Journal, April 2016; 30(1):Suppl 571.1). To model the inherited disease neurofibromatosis type 1 (NF-1) Schomberg used CRISPR-Cas9 to introduce mutations in the swine neurofibromin 1 gene by cytosolic microinjection of CRISPR/Cas9 components into swine embryos. CRISPR guide RNAs (gRNA) were created for regions targeting sites both upstream and downstream of an exon within the gene for targeted cleavage by Cas9 and repair was mediated by a specific single-stranded oligodeoxynucleotide (ssODN) template to introduce a 2500 bp deletion. The CRISPR-Cas system was also used to engineer swine with specific NF-1 mutations or clusters of mutations, and further can be used to engineer mutations that are specific to or representative of a given human individual. The invention is similarly used to develop animal models, including but not limited to swine models, of human multigenic diseases. According to the invention, multiple genetic loci in one gene or in multiple genes are simultaneously targeted using multiplexed guides and optionally one or multiple templates.

[1216] The present invention is also applicable to modifying SNPs of other animals, such as cows. Tan et al. (Proc Natl Acad Sci USA. 2013 Oct. 8; 110(41): 16526-16531) expanded the livestock gene editing toolbox to include transcription activator-like (TAL) effector nuclease (TALEN)- and clustered regularly interspaced short palindromic repeats (CRISPR)/Cas9-stimulated homology-directed repair (HDR) using plasmid, rAAV, and oligonucleotide templates. Gene specific gRNA sequences were cloned into the Church lab gRNA vector (Addgene ID: 41824) according to their methods (Mali P, et al. (2013) RNA-Guided Human Genome Engineering via Cas9. Science 339(6121):823-826). The Cas9 nuclease was provided either by co-transfection of the hCas9 plasmid (Addgene ID: 41815) or mRNA synthesized from RCIScript-hCas9. This RCIScript-hCas9 was constructed by sub-cloning the XbaI-AgeI fragment from the hCas9 plasmid (encompassing the hCas9 cDNA) into the RCIScript plasmid. The C2c1 effector protein may be applied to a similar system. With respect to the C2c1 protein, the CRISPR-C2c1 system ma recognize a PAM sequence that is 5′ TTN 3′ or 5′ ATTN 3′, wherein N is any nucleotide. In some embodiments, the CRISPR-C2c1 system introduces one or more staggered double strand breaks (DSBs) with a 5′ overhang to the target gene. In particular embodiments, the 5′ overhang is 7-nt. In some embodiments, the CRISPR-C2c1 system introduces a template DNA sequence at the staggered DSB via HR or NHEJ. In some particular embodiments, the CRISPR-C2c1 system comprises a catalytically inactivated C2c1 protein associated with a functional domain that modifies the target gene. In a particular embodiment, the CRISPR-C2c1 system introduces a single mutation. In another particular embodiment, the CRISPR-C2c1 system introduces a single nucleotide modification at the SNP position of the transcript.

[1217] Heo et al. (Stem Cells Dev. 2015 Feb. 1; 24(3):393-402. doi: 10.1089/scd.2014.0278. Epub 2014 Nov. 3) reported highly efficient gene targeting in the bovine genome using bovine pluripotent cells and clustered regularly interspaced short palindromic repeat (CRISPR)/Cas9 nuclease. First, Heo et al. generate induced pluripotent stem cells (iPSCs) from bovine somatic fibroblasts by the ectopic expression of yamanaka factors and GSK30 and MEK inhibitor (2i) treatment. Heo et al. observed that these bovine iPSCs are highly similar to naïve pluripotent stem cells with regard to gene expression and developmental potential in teratomas. Moreover, CRISPR-Cas9 nuclease, which was specific for the bovine NANOG locus, showed highly efficient editing of the bovine genome in bovine iPSCs and embryos. The C2c1 effector protein may be applied to a similar system. With respect to the C2c1 protein, the CRISPR-C2c1 system may recognize a PAM sequence that is 5′ TTN 3′ or 5′ ATTN 3′, wherein N is any nucleotide. In some embodiments, the CRISPR-C2c1 system introduces one or more staggered double strand breaks (DSBs) with a 5′ overhang to the NANOG locus. In particular embodiments, the 5′ overhang is 7 nt. In some embodiments, the CRISPR-C2c1 system introduces a template DNA sequence at the staggered DSB via HR or NHEJ. In some particular embodiments, the CRISPR-C2c1 system comprises a catalytically inactivated C2c1 protein associated with a functional domain that modifies the NANOG locus. In a particular embodiment, the CRISPR-C2c1 system introduces a single mutation. In another particular embodiment, the CRISPR-C2c1 system introduces a single nucleotide modification to the transcript corresponding to the NANOG locus.

[1218] Igenity® provides a profile analysis of animals, such as cows, to perform and transmit traits of economic traits of economic importance, such as carcass composition, carcass quality, maternal and reproductive traits and average daily gain. The analysis of a comprehensive Igenity® profile begins with the discovery of DNA markers (most often single nucleotide polymorphisms or SNPs). All the markers behind the Igenity® profile were discovered by independent scientists at research institutions, including universities, research organizations, and government entities such as USDA. Markers are then analyzed at Igenity® in validation populations. Igenity® uses multiple resource populations that represent various production environments and biological types, often working with industry partners from the seedstock, cow-calf, feedlot and/or packing segments of the beef industry to collect phenotypes that are not commonly available. Cattle genome databases are widely available, see, e.g., the NAGRP Cattle Genome Coordination Program (www.animalgenome.org/cattle/maps/db.html). Thus, the present invention maybe applied to target bovine SNPs. One of skill in the art may utilize the above protocols for targeting SNPs and apply them to bovine SNPs as described, for example, by Tan et al. or Heo et al.

[1219] Qingjian Zou et al. (Journal of Molecular Cell Biology Advance Access published Oct. 12, 2015) demonstrated increased muscle mass in dogs by targeting the first exon of the dog Myostatin (MSTN) gene (a negative regulator of skeletal muscle mass). First, the efficiency of the sgRNA was validated, using cotransfection of the sgRNA targeting MSTN with a Cas9 vector into canine embryonic fibroblasts (CEFs). Thereafter, MSTN KO dogs were generated by micro-injecting embryos with normal morphology with a mixture of Cas9 mRNA and MSTN sgRNA and auto-transplantation of the zygotes into the oviduct of the same female dog. The knock-out puppies displayed an obvious muscular phenotype on thighs compared with its wild-type littermate sister. This can also be performed using the CRISPR-C2c1 systems provided herein. With respect to the C2c1 protein, the CRISPR-C2c1 system may recognize a PAM sequence that is 5′ TTN 3′ or 5′ ATTN 3′, wherein N is any nucleotide. In some embodiments, the CRISPR-C2c1 system introduces one or more staggered double strand breaks (DSBs) with a 5′ overhang to the target gene. In particular embodiments, the 5′ overhang is 7 nt. In some embodiments, the CRISPR-C2c1 system introduces a template DNA sequence at the staggered DSB via HR or NHEJ. In some particular embodiments, the CRISPR-C2c1 system comprises a catalytically inactivated C2c1 protein associated with a functional domain that modifies the target gene. In a particular embodiment, the CRISPR-C2c1 system introduces a single mutation. In another particular embodiment, the CRISPR-C2c1 system introduces a single nucleotide modification to the transcript.

### Livestock

[1220] Viral targets in livestock may include, in some embodiments, porcine CD163, for example on porcine macrophages. CD163 is associated with infection (thought to be through viral cell entry) by PRRSv (Porcine Reproductive and Respiratory Syndrome virus, an arterivirus). Infection by PRRSv, especially of porcine alveolar macrophages (found in the lung), results in a previously incurable porcine syndrome (“Mystery swine disease” or “blue ear disease”) that causes suffering, including reproductive failure, weight loss and high mortality rates in domestic pigs. Opportunistic infections, such as enzootic pneumonia, meningitis and ear oedema, are often seen due to immune deficiency through loss of macrophage activity. It also has significant economic and environmental repercussions due to increased antibiotic use and financial loss (an estimated $660m per year).

[1221] As reported by Kristin M Whitworth and Dr Randall Prather et al. (Nature Biotech 3434 published online 7 Dec. 2015) at the University of Missouri and in collaboration with Genus Plc, CD163 was targeted using CRISPR-Cas9 and the offspring of edited pigs were resistant when exposed to PRRSv. One founder male and one founder female, both of whom had mutations in exon 7 of CD163, were bred to produce offspring. The founder male possessed an 11-bp deletion in exon 7 on one allele, which results in a frameshift mutation and missense translation at amino acid 45 in domain 5 and a subsequent premature stop codon at amino acid 64. The other allele had a 2-bp addition in exon 7 and a 377-bp deletion in the preceding intron, which were predicted to result in the expression of the first 49 amino acids of domain 5, followed by a premature stop code at amino acid 85. The sow had a 7 bp addition in one allele that when translated was predicted to express the first 48 amino acids of domain 5, followed by a premature stop codon at amino acid 70. The sow's other allele was unamplifiable. Selected offspring were predicted to be a null animal (CD163−/−), i.e. a CD163 knock out.

[1222] Accordingly, in some embodiments, porcine alveolar macrophages may be targeted by the CRISPR protein. In some embodiments, porcine CD163 may be targeted by the CRISPR protein. In some embodiments, porcine CD163 may be knocked out through induction of a DSB or through insertions or deletions, for example targeting deletion or modification of exon 7, including one or more of those described above, or in other regions of the gene, for example deletion or modification of exon 5.

[1223] An edited pig and its progeny are also envisaged, for example a CD163 knock out pig. This may be for livestock, breeding or modelling purposes (i.e. a porcine model). Semen comprising the gene knock out is also provided.

[1224] CD163 is a member of the scavenger receptor cysteine-rich (SRCR) superfamily. Based on in vitro studies SRCR domain 5 of the protein is the domain responsible for unpackaging and release of the viral genome. As such, other members of the SRCR superfamily may also be targeted in order to assess resistance to other viruses. PRRSV is also a member of the mammalian arterivirus group, which also includes murine lactate dehydrogenase-elevating virus, simian hemorrhagic fever virus and equine arteritis virus. The arteriviruses share important pathogenesis properties, including macrophage tropism and the capacity to cause both severe disease and persistent infection. Accordingly, arteriviruses, and in particular murine lactate dehydrogenase-elevating virus, simian hemorrhagic fever virus and equine arteritis virus, may be targeted, for example through porcine CD163 or homologues thereof in other species, and murine, simian and equine models and knockout also provided.

[1225] Indeed, this approach may be extended to viruses or bacteria that cause other livestock diseases that may be transmitted to humans, such as Swine Influenza Virus (SIV) strains which include influenza C and the subtypes of influenza A known as H1N1, H1N2, H2N1, H3N1, H3N2, and H2N3, as well as pneumonia, meningitis and oedema mentioned above.

[1226] The C2c1 effector protein may be applied to similar systems as described above. With respect to the C2c1 protein, the CRISPR-C2c1 system may recognize a PAM sequence that is T-rich. In some embodiments, the PAM is 5′ TTN 3′ or 5′ ATTN 3′, wherein N is any nucleotide. In some embodiments, the CRISPR-C2c1 system introduces one or more staggered double strand breaks (DSBs) with a 5′ overhang to the CD163 locus. In particular embodiments, the 5′ overhang is 7 nt. In some embodiments, the CRISPR-C2c1 system introduces an exogenous template DNA sequence at the staggered DSB via HR or NHEJ. In some particular embodiments, the CRISPR-C2c1 system comprises a catalytically inactivated C2c1 protein associated with a functional domain that modifies CD163. In a particular embodiment, the CRISPR-C2c1 system introduces a single mutation. In another particular embodiment, the CRISPR-C2c1 system introduces a single nucleotide modification to the CD163 transcript without modifying the genome of the livestock.

[1227] Uncoupling protein 1 (UCP1) is localized on the inner mitochondrial membrane and generates heat by uncoupling ATP synthesis from proton transit across the inner membrane. UCP1 is a key element of nonshivering thermogenesis and is most likely important in the regulation of body adiposity. Pigs (Artiodactyl family Suidae) lacking a functional UCP1 gene suffer from poor thermoregulation and are susceptibility to cold. Pigs' fat accumulation may also be linked to their lack of UCP1, and thus influences the efficiency of pig production. Zheng et al. reported application of a CRISPR/Cas9-mediated, homologous recombination (HR)-independent approach to efficiently insert mouse adiponectin-UCP1 into the porcine endogenous UCP1 locus.

[1228] The UCP1 knock-in (KI) pigs showed an improved ability to maintain body temperature during acute cold exposure, but they did not have alterations in physical activity levels or total daily energy expenditure (DEE). Ectopic UCP1 expression in white adipose tissue (WAT) dramatically decreased fat deposition by 4.89% (P<0.01), consequently increasing carcass lean percentage (CLP; P<0.05). Mechanism studies indicated that the loss of fat upon UCP1 activation in WAT was linked to elevated lipolysis. The CRISPR-C2c1 system disclosed in this invention may be applied to similar systems as described in Zheng et al. With respect to the C2c1 protein, the CRISPR-C2c1 system may recognize a PAM sequence that is T-rich. In some embodiments, the PAM is 5′ TTN 3′ or 5′ ATTN 3′, wherein N is any nucleotide. In some embodiments, the CRISPR-C2c1 system introduces one or more staggered double strand breaks (DSBs) with a 5′ overhang. In certain embodiments, the 5′ overhang is 7 nt. In particular embodiments, the CRISPR-C2c1 system may be used to introduce an exogenous template DNA sequence at the staggered DSB at the UCP1 locus via HR or HR independent mechanism, such as NHEJ.

[1229] Niu et al. (DOI: 10.1126/science.aan4187) reported a porcine endogenous retroviruses (PERVs) inactivated pig livestock via somatic cell nuclear transfer with a CRISPR-Cas9 system. Xenotransplantation is a promising strategy to alleviate the shortage of organs for human transplantation. One main risk of cross-species transmission of porcine endogenous retroviruses (PERVs) which are harmless to pigs but may be lethal to human. Described inactivating PERV activity in an immortalized pig cell line with CRISPR-Cas9 and generating PERV-inactivated pigs via somatic nuclear transfer. Wu et al. (Scientific Reports 7, Article number: 10487 (2017) doi:10.1038/s41598-017-08596-5) reported efficient disabling of pancreatogenesis in pig embryos via zygotic co-delivery of Cas9 mRNA and dual sgRNAs targeting the PDX1 gene, which when combined with chimeric-competent human pluripotent stem cells may serve as a suitable platform for the xeno-generation of human tissues and organs in pigs. Zhou et al. (Hum Mutat 37:110-118, 2016) reported gene-modified pigs harboring precise orthologous human mutation (Sox 10 c.A325>T) via CRISPR-Cas9 induced HDR in pig zygotes using single strand DNA as template with an efficiency as high as 80%. The CRISPR-C2c1 system as disclosed herein may be applied to similar systems as described in Niu et al., Wu et al. at Zhou et al to produce swine livestock. in certain embodiments, the CRISPR-C2c1 system modifies a virus resistance related gene. In some embodiments, the CRISPR-C2c1 system modifies a disease related gene. In certain embodiments, the CRISPR-C2c1 system modifies a livestock biomass related gene. In certain embodiments, the CRISPR-C2c1 system modifies a livestock trait related gene. In particular embodiments, the trati related gene is involved in the regulation of adiposity. In some embodiments, the trait related gene is involved in regulation of expression of specific proteins, wherein such proteins are related to food allergy. In a particular embodiment, the CRISPR-C2c1 system modifies the UCP1 locus. With respect to the C2c1 protein, the CRISPR-C2c1 system recognizes a PAM sequence that is T-rich. In some embodiments, the PAM is 5′ TTN 3′ or 5′ ATTN 3′, wherein N is any nucleotide. In some embodiments, the CRISPR-C2c1 system introduces one or more staggered double strand breaks (DSBs) with a 5′ overhang. In particular embodiments, the 5′ overhang is 7 nt. In some embodiments, the CRISPR-C2c1 system introduces an exogenous template DNA sequence at the staggered DSB via HR or NHEJ. In some particular embodiments, the CRISPR-C2c1 system comprises a catalytically inactivated C2c1 protein associated with a functional domain that modifies the target locus of interest. In a particular embodiment, the CRISPR-C2c1 system introduces a single mutation. In another particular embodiment, the CRISPR-C2c1 system introduces a single nucleotide modification to the transcript of the target locus of interest without modifying the genome of the livestock.

[1230] Gao et al. (Genome Biology 201718:13, doi:10.1186/s13059-016-1144-4) reported tuberculosis (TB) resistant cattle livestock using a single CRISPR-Cas9 nickase (Cas9n) to induce gene insertion at a selected locus in cattle. The main binding sites of a catalytically inactive Cas9 protein was determined in bovine fetal fibroblast cells (BFFs) with chromatin immunoprecipitation sequencing (ChIP-seq). Subsequently, a CRISPR-Cas9n-induced single-strand break was used to stimulate the insertion of the natural resistance-associated macrophage protein-1 (NRAMP1) gene. The TB resistant livestock was obtained via somatic cell nuclear transfer. Carlson et al. (Nat Biotechnol. 2016 May 6; 34(5):479-81. doi: 10.1038/nbt.3560) reported hornless dairy cattle livestock using transcription activator-like effector nucleases (TALENs) to inserted an allele of the POLLED gene into the genome of bovine embryo fibroblasts followed by somatic cell nuclear transfer to clone the genetically engineered cell lines and implanted the embryos into recipient cow. The CRISPR-C2c1 system as disclosed herein may be applied to similar systems as described in Gao et al. and Carlson et al in producing cattle livestock. in certain embodiments, the CRISPR-C2c1 system modifies a virus resistance related gene. In some embodiments, the CRISPR-C2c1 system modifies a disease related gene. In certain embodiments, the CRISPR-C2c1 system modifies a livestock biomass related gene. In certain embodiments, the CRISPR-C2c1 system modifies a livestock trait related gene. In some embodiments, the trait related gene is involved in regulation of expression of specific proteins, wherein such proteins are related to food allergy. the In particular embodiments, the trait related gene is involved in the regulation of adiposity. With respect to the C2c1 protein, the CRISPR-C2c1 system recognizes a PAM sequence that is T-rich. In some embodiments, the PAM is 5′ TTN 3′ or 5′ ATTN 3′, wherein N is any nucleotide. In some embodiments, the CRISPR-C2c1 system introduces one or more staggered double strand breaks (DSBs) with a 5′ overhang. In particular embodiments, the 5′ overhang is 7 nt. In some embodiments, the CRISPR-C2c1 system introduces an exogenous template DNA sequence at the staggered DSB via HR or NHEJ. In some embodiments, the C2c1 effector protein comprises one or more mutations. In some embodiments, the C2c1 effector protein is a nickase. In some particular embodiments, the CRISPR-C2c1 system comprises a catalytically inactivated C2c1 protein associated with a functional domain that modifies the target locus of interest. In a particular embodiment, the CRISPR-C2c1 system introduces a single mutation. In another particular embodiment, the CRISPR-C2c1 system introduces a single nucleotide modification to the transcript of the target locus of interest without modifying the genome of the livestock.

[1231] Two chicken genes ovalbumin (OVA) and ovomucoid (OVM) have been shown as related to egg white allergy. Gene disruption of OVA and OVM has the potential to produce low allergenicity in eggs, thereby reducing immune responses in individuals sensitive to items such as egg white-containing food products and vaccines. Oishi et al. (Scientific Reports 6, Article number: 23980 (2016) doi:10.1038/srep23980) reported CRISPR/Cas9-mediated gene targeting in chickens. Two egg white genes, ovalbumin and ovomucoid, were efficiently (>90%) mutagenized in cultured chicken primordial germ cells (PGCs) by transfection of circular plasmids encoding Cas9, a single guide RNA, and a gene encoding drug resistance, followed by transient antibiotic selection. CRISPR-induced mutant-ovomucoid PGCs were transplanted into recipient chicken embryos and three germline chimeric roosters (GO) were established. All of the roosters had donor-derived mutant-ovomucoid spermatozoa, and the two with a high transmission rate of donor-derived gametes produced heterozygous mutant ovomucoid chickens as about half of their donor-derived offspring in the next generation (G1). ovomucoid homozygous mutant offspring (G2) were generated by crossing the G1 mutant chickens.

[1232] Traditional methods of avian transgenesis involve retroviral infection of blastoderms or the ex vivo manipulation of primordial germ cells (PGCs) followed by injection of the cells back into a recipient embryo. Unlike in mammalian systems, avian embryonic PGCs undergo a migration through the vasculature on their path to the gonad where they become the sperm or ova producing cells. Tyack et al. (Transgenic Res. 2013 December; 22(6):1257-64. doi: 10.1007/s11248-013-9727-2) described a method of transforming PGC using Lipofectamine 2000 complexed with Tol2 transposon and transposase plasmids to stably transform PGCs in vivo generating transgenic offspring that express a reporter gene carried in the transposon. The CRISPR-C2c1 system as disclosed herein may be applied to similar systems as described in Oishi et al. in producing poultry livestock. in certain embodiments, the CRISPR-C2c1 system modifies a virus resistance related gene. In some embodiments, the CRISPR-C2c1 system modifies a disease related gene. In certain embodiments, the CRISPR-C2c1 system modifies a livestock biomass related gene. In certain embodiments, the CRISPR-C2c1 system modifies a livestock trait related gene. In some embodiments, the trait related gene is involved in regulation of expression of specific proteins, wherein such proteins are related to food allergy. In particular embodiments, the trait related gene is involved in the regulation of adiposity. With respect to the C2c1 protein, the CRISPR-C2c1 system recognizes a PAM sequence that is T-rich. In some embodiments, the PAM is 5′ TTN 3′ or 5′ ATTN 3′, wherein N is any nucleotide. In some embodiments, the CRISPR-C2c1 system introduces one or more staggered double strand breaks (DSBs) with a 5′ overhang. In particular embodiments, the 5′ overhang is 7 nt. In some embodiments, the CRISPR-C2c1 system introduces an exogenous template DNA sequence at the staggered DSB via HR or NHEJ. In some embodiments, the C2c1 effector protein comprises one or more mutations. In some embodiments, the C2c1 effector protein is a nickase. In some particular embodiments, the CRISPR-C2c1 system comprises a catalytically inactivated C2c1 protein associated with a functional domain that modifies the target locus of interest. In a particular embodiment, the CRISPR-C2c1 system introduces a single mutation. In another particular embodiment, the CRISPR-C2c1 system introduces a single nucleotide modification to the transcript of the target locus of interest without modifying the genome of the livestock.

### Animal Models

[1233] The present invention provides a CRISPR-Cas system that may be used to develop animal models and cell models, in vivo, ex vivo and in vitro.

[1234] Niu et al. (Cell. 2014 Feb. 13; 156(4):836-43. doi: 10.1016/j.cell.2014.01.027) developed a monkey model that may serve as important model species for studying human diseases and developing therapeutic strategies, yet the application of monkeys in biomedical researches has been significantly hindered by the difficulties in producing animals genetically modified at the desired target sites by applying the CRISPR/Cas9 system. The system enabled simultaneous disruption of two target genes (Ppar-γ and Rag1) in one step, and no off-target mutagenesis was detected by comprehensive analysis.

[1235] Wang et al. (Cell. 2013; 153(4):910-8) described producing embryonic stem cell (ESC) transfection model with high efficiency for producing single (95%) or double mutant (70-80%) mice using direct injection of Cas9 mRNA and sgRNAs into fertilized zygotes. Various mouse models in mice zygote cells were described in yen et al, Dev Biol. 2014; 393(1):3-9, Aida et al. Biol. 2015; 16(1):87, Inui et al., Sci Rep. 2014; 4:5396, Yang et al. Cell. 2013; 154(6):1370-9. Transplantation disease models involving ex vivo modification of stem cells provide an alternative to creating germline mutations, for example, with sgRNAs targeting p53 in Eμ-Myc lymphomas. See Heckl et al, Nat Biotechnol. 2014; 32(9):941-946, Chen et al. Cell. 2015; 160(6):1246-1260.

[1236] In one aspect, the present invention provides a treatment for tumors of the central nerve system, particularly induced by neurofibromatosis type 1 (NF1) neurogenetic conditions. individuals with NF1 are born with a germline mutation in the NF1 gene, but may develop numerous distinct neurological problems, ranging from autism and attention deficit to brain and peripheral nerve sheath tumors. The present invention may be used to develop a patient-specific disease model and to study induced pluripotent stem cell (iPSC)-derived disease relevant cells in an isogenic background. Embryonic stem cell (ESC)-like cells, also known as induced pluripotent stem cell or iPSC, can be generated from skin or blood cells in adult patients. recent research efforts have started to develop culture protocols that differentiate iPSCs into a variety of cell types in the central and peripheral nervous system (CNS and PNS), which are affected in NF1 patients. the CRISPR C2c1 system of this invention may be used to genetically edit the specific disease genes either by repairing the existing mutant genes or creating new mutations. In order to position at the forefront of NF1 research, it will be important for the Gilbert Family Neurofibromatosis Institute (GFNI) at the Children's National Medical Center to explore these recent exciting research developments, to systematically develop patient-specific human NF1 disease models, and to provide a tool for drug screening and evaluation on the individual NF patients.

[1237] In one aspect, the present invention provides a method of developing a inducible disease model.

[1238] Platt et al. (Cell. 2014; 159(2):440-55.) developed a Cre-dependent CAGs-LSL-Cas9 knock-in transgene, while ‘all-in-one’, doxycycline (dox)-inducible constructs were generated to provide both sgRNAs and Cas9 in the germline of the animal. The Cre-dependent model allows simple incorporation of CRISPR-mediated targeting into existing Cre-driven systems, and provides robust and widespread Cas9 expression downstream of the strong CAGs promoter. The dox-inducible model enables targeting in either individual or multiple tissues, is not restricted by the ability to delivery exogenous sgRNAs, and provides a means to extinguish Cas9 expression following gene modification. Both approaches show extremely high efficiency of single or multiplexed gene modification in multiple tissues, and recapitulate the phenotypic consequences seen in traditional genetic knockouts. Each is amenable to the delivery of sgRNAs exogenously or through the germline of the animal, although importantly, the stable integration of Cas9 in the genome, avoids the complication of packaging a large Cas9 cDNA into size restricted viral cassettes.

[1239] Creating a single-nucleotide polymorphism (SNP) animal model of human disease by CRISPR/Cas9 genome editing is now routine in rodent. These models lead to functional insights into the human genetics and allow development of potential new therapies. For example, a human GWAS identified a potential pathological SNP (rs1039084 A>G) in the STXBP5 gene, regulator of platelet secretion in humans. This mutation was then reproduced by CRISPR in the mouse with the nearly same thrombosis phenotype allowing to confirm the causality of this SNP in human (Zhu et al. Arterioscler Thromb Vasc Biol. 2017; 37:264-270). Likewise, whole-genome sequencing was used to perform a GWAS in a population-based biobank from Estonia. A number of potential causal variants and underlying mechanisms were identified. One of them is a regulatory element that is necessary for basophil production, it acts specifically during this process to regulate expression of the transcription factor CEBPA. This enhancer was perturbed by CRISPR/Cas9 in hematopoietic stem and progenitor cells demonstrating that it specifically regulates CEBPA expression during basophil differentiation (Guo et al. Proc Natl Acad Sci. 2016; 114:E327-E336. doi: 10.1073/pnas.1619052114). The CRISPR-C2c1 system as disclosed herein may be used with methods described in the perturbation and disruption systems as described in Zhu et al., Niu et al., and Wang et al., etc. In some embodiments, the animal model comprises non-human eukaryote cells. In some embodiments, the animal model comprises non-human mammal cells. in some embodiments, the animal model comprises primate cells. In certain embodiments, the animal model comprises fish, ezebra fish, ape, chimpanzee, macaque, mouse, rabbit, rat, canine, bovine, ovine, goat or pig cells. With respect to the C2c1 protein, the CRISPR-C2c1 system recognizes a PAM sequence that is T-rich. In some embodiments, the PAM is 5′ TTN 3′ or 5′ ATTN 3′, wherein N is any nucleotide. In some embodiments, the CRISPR-C2c1 system introduces one or more staggered double strand breaks (DSBs) with a 5′ overhang. In particular embodiments, the 5′ overhang is 7 nt. In some embodiments, the CRISPR-C2c1 system introduces an exogenous template DNA sequence at the staggered DSB via HR or NHEJ. In preferred embodiments, the CRISPR-C2c1 system introduces an exogenous template DNA sequence at the staggered DSB via NHEJ. In some embodiments, the C2c1 effector protein comprises one or more mutations. In some embodiments, the C2c1 effector protein is a nickase. In some particular embodiments, the CRISPR-C2c1 system comprises a catalytically inactivated C2c1 protein associated with a functional domain that modifies the target locus of interest. In a particular embodiment, the CRISPR-C2c1 system introduces a single mutation. In another particular embodiment, the CRISPR-C2c1 system introduces a single nucleotide modification to the transcript of the target locus of interest without modifying the genome of the livestock.

### Therapeutic Applications

[1240] As will be apparent, it is envisaged that the present system can be used to target any polynucleotide sequence of interest. The invention provides a non-naturally occurring or engineered composition, or one or more polynucleotides encoding components of said composition, or vector or delivery systems comprising one or more polynucleotides encoding components of said composition for use in a modifying a target cell in vivo, ex vivo or in vitro and, may be conducted in a manner alters the cell such that once modified the progeny or cell line of the CRISPR modified cell retains the altered phenotype. The modified cells and progeny may be part of a multi-cellular organism such as a plant or animal with ex vivo or in vivo application of CRISPR system to desired cell types. The CRISPR invention may be a therapeutic method of treatment. The therapeutic method of treatment may comprise gene or genome editing, or gene therapy.

### Treating Pathogens, Like Bacterial, Fungal and Parasitic Pathogens

[1241] The present invention may also be applied to treat bacterial, fungal and parasitic pathogens. Most research efforts have focused on developing new antibiotics, which once developed, would nevertheless be subject to the same problems of drug resistance. The invention provides novel CRISPR-based alternatives which overcome those difficulties. Furthermore, unlike existing antibiotics, CRISPR-based treatments can be made pathogen specific, inducing bacterial cell death of a target pathogen while avoiding beneficial bacteria.

[1242] Jiang et al. (“RNA-guided editing of bacterial genomes using CRISPR-Cas systems,” Nature Biotechnology vol. 31, p. 233-9, March 2013) used a CRISPR-Cas9 system to mutate or kill S. pneumoniae and E. coli. The work, which introduced precise mutations into the genomes, relied on dual-RNA:Cas9-directed cleavage at the targeted genomic site to kill unmutated cells and circumvented the need for selectable markers or counter-selection systems. CRISPR systems have been used to reverse antibiotic resistance and eliminate the transfer of resistance between strains. Bickard et al. showed that Cas9, reprogrammed to target virulence genes, kills virulent, but not avirulent, S. aureus. Reprogramming the nuclease to target antibiotic resistance genes destroyed staphylococcal plasmids that harbor antibiotic resistance genes and immunized against the spread of plasmid-borne resistance genes. (see, Bikard et al., “Exploiting CRISPR-Cas nucleases to produce sequence-specific antimicrobials,” Nature Biotechnology vol. 32, 1146-1150, doi:10.1038/nbt.3043, published online 5 Oct. 2014.) Bikard showed that CRISPR-Cas9 antimicrobials function in vivo to kill S. aureus in a mouse skin colonization model. Similarly, Yosef et al used a CRISPR system to target genes encoding enzymes that confer resistance to β-lactam antibiotics (see Yousef et al., “Temperate and lytic bacteriophages programmed to sensitize and kill antibiotic-resistant bacteria,” Proc. Natl. Acad. Sci. USA, vol. 112, p. 7267-7272, doi: 10.1073/pnas.1500107112 published online May 18, 2015).

[1243] CRISPR systems can be used to edit genomes of parasites that are resistant to other genetic approaches. For example, a CRISPR-Cas9 system was shown to introduce double-stranded breaks into the in the Plasmodium yoelii genome (see, Zhang et al., “Efficient Editing of Malaria Parasite Genome Using the CRISPR/Cas9 System,” mBio. vol. 5, e01414-14, July-August 2014). Ghorbal et al. (“Genome editing in the human malaria parasite Plasmodium falciparumusing the CRISPR-Cas9 system,” Nature Biotechnology, vol. 32, p. 819-821, doi: 10.1038/nbt.2925, published online Jun. 1, 2014) modified the sequences of two genes, orc1 and kelch13, which have putative roles in gene silencing and emerging resistance to artemisinin, respectively. Parasites that were altered at the appropriate sites were recovered with very high efficiency, despite there being no direct selection for the modification, indicating that neutral or even deleterious mutations can be generated using this system. CRISPR-Cas9 is also used to modify the genomes of other pathogenic parasites, including Toxoplasma gondii (see Shen et al., “Efficient gene disruption in diverse strains of Toxoplasma gondii using CRISPR/CAS9,” mBio vol. 5:e01114-14, 2014; and Sidik et al., “Efficient Genome Engineering of Toxoplasma gondii Using CRISPR/Cas9,” PLoS One vol. 9, e100450, doi: 10.1371/journal.pone.0100450, published online Jun. 27, 2014).

[1244] Vyas et al. (“A Candida albicans CRISPR system permits genetic engineering of essential genes and gene families,” Science Advances, vol. 1, e1500248, DOI: 10.1126/sciadv.1500248, Apr. 3, 2015) employed a CRISPR system to overcome long-standing obstacles to genetic engineering in C. albicans and efficiently mutate in a single experiment both copies of several different genes. In an organism where several mechanisms contribute to drug resistance, Vyas produced homozygous double mutants that no longer displayed the hyper-resistance to fluconazole or cycloheximide displayed by the parental clinical isolate Can90. Vyas also obtained homozygous loss-of-function mutations in essential genes of C. albicans by creating conditional alleles. Null alleles of DCR1, which is required for ribosomal RNA processing, are lethal at low temperature but viable at high temperature. Vyas used a repair template that introduced a nonsense mutation and isolated dcr1/dcr1 mutants that failed to grow at 16° C.

[1245] The CRISPR system of the present invention for use in P. falciparum by disrupting chromosomal loci. Ghorbal et al. (“Genome editing in the human malaria parasite Plasmodium falciparum using the CRISPR-Cas9 system”, Nature Biotechnology, 32, 819-821 (2014), DOI: 10.1038/nbt.2925, Jun. 1, 2014) employed a CRISPR system to introduce specific gene knockouts and single-nucleotide substitutions in the malaria genome. To adapt the CRISPR-Cas9 system to P. falciparum, Ghorbal et al. generated expression vectors for under the control of plasmodial regulatory elements in the pUF1-Cas9 episome that also carries the drug-selectable marker ydhodh, which gives resistance to DSM1, a P. falciparum dihydroorotate dehydrogenase (PfDHODH) inhibitor and for transcription of the sgRNA, used P. falciparum U6 small nuclear (sn)RNA regulatory elements placing the guide RNA and the donor DNA template for homologous recombination repair on the same plasmid, pL7. See also, Zhang C. et al. (“Efficient editing of malaria parasite genome using the CRISPR/Cas9 system”, MBio, 2014 Jul. 1; 5(4):E01414-14, doi: 10.1128/MbIO.01414-14) and Wagner et al. (“Efficient CRISPR-Cas9-mediated genome editing in Plasmodium falciparum, Nature Methods 11, 915-918 (2014), DOI: 10.1038/nmeth.3063).

[1246] In one aspect, the present invention provides a method of disrupting chromosome loci in organisms with A/T rich genomes such as P. falciparum. In some embodiments, the CRISPR system of the present invention comprises a CRISPR-C2c1 system, wherein the C2c1 protein creates a 7-nt staggered cut at the target site and wherein the PAM sequence is a T-rich sequence (Gardner et al., Nature. 2002; 419:531-534). A person with ordinary skill in the art may use the methods as described in Jiang et al, Bikard et al, Yosef et al, Vyas et al, Ghober et al, Zhang et al and Wagner et al with the CRISPR-C2c1 system as disclosed herein to introduce sequence disruption in A/T rich genomes.

[1247] In certain embodiments, the locus of interest is modified by the CRISPR-C2c1 complex by inserting, or “knocking-in” a template DNA sequence. In particular embodiments, the DNA insert is designed to integrate into the genome in the proper orientation. In preferred embodiments, the locus of interest is modified by the CRISPR-C2c1 system in non-dividing cells, where genome editing via homology-directed repair (HDR) mechanisms are especially challenging (Chan et al., Nucleic acids research. 2011; 39:5955-5966). Maresca et al. (Genome Res. 2013 March; 23(3): 539-546) described a method of site directed, precise insertion applicable with zinc finger nucleases (ZFNs) and Tale nucleases (TALENs) wherein short, double-stranded DNAs with 5′ overhangs were ligated to complementary ends, which allowed precise insertion of 15-kb exogeneous expression cassette at defined locus in human cell lines. He et al. (Nucleic Acids Res. 2016 May 19; 44(9)) described CRISPR/Cas9-induced site-specific knock-in of a 4.6 kb promoterless ires-eGFP fragment into the GAPDH locus yielded up to 20% GFP+ cells in somatic LO2 cells, and 1.70% GFP+ cells in human embryonic stem cells mediated by the NHEJ pathway and also reported that the NHEJ-based knock-in is more efficient than HDR-mediated gene targeting in all human cell types examined. Because C2c1 generates a staggered cut with a 5′ overhang, one with ordinary skill in the art could use the methods similar to that as described in Meresca et al. and He et al. to generate exogenous DNA insertions at a locus of interest with the CRISPR-C2c1 system disclosed herein.

[1248] In certain embodiments, the locus of interest is first modified by the CRISPR-C2c1 system at the distal end of the PAM sequence, and further modified by the CRISPR-C2c1 system near the PAM sequence and repaired via HDR. In certain embodiments, the locus of interest is modified by the CRISPR-C2c1 system by introducing a mutation, deletion, or insertion of exogenous DNA sequence via HDR. In some embodiments, the locus of interest is modified by the CRISPR-C2c1 system by introducing a mutation, deletion, or insertion of exogenous DNA sequence via NHEJ. In preferred embodiments, the exogenous DNA is flanked by single guide DNA (sgDNA)-PAM sequences on both 3′ and 5′ ends. In preferred embodiments, the exogenous DNA is released after CRISPR-C2c1 cleavage.

### Treating Pathogens, Like Viral Pathogens Such as HIV

[1249] Cas-mediated genome editing might be used to introduce protective mutations in somatic tissues to combat nongenetic or complex diseases. For example, NHEJ-mediated inactivation of the CCR5 receptor in lymphocytes (Lombardo et al., Nat Biotechnol. 2007 November; 25(11):1298-306) may be a viable strategy for circumventing HIV infection, whereas deletion of PCSK9 (Cohen et al., Nat Genet. 2005 February; 37(2):161-5) orangiopoietin (Musunuru et al., N Engl J Med. 2010 Dec. 2; 363(23):2220-7) may provide therapeutic effects against statin-resistant hypercholesterolemia or hyperlipidemia. Although these targets may be also addressed using siRNA-mediated protein knockdown, a unique advantage of NHEJ-mediated gene inactivation is the ability to achieve permanent therapeutic benefit without the need for continuing treatment. As with all gene therapies, it will of course be important to establish that each proposed therapeutic use has a favorable benefit-risk ratio.

[1250] Hydrodynamic delivery of plasmid DNA encoding Cas9 nd guide RNA along with a repair template into the liver of an adult mouse model of tyrosinemia was shown to be able to correct the mutant Fah gene and rescue expression of the wild-type Fah protein in ˜1 out of 250 cells (Nat Biotechnol. 2014 June; 32(6):551-3). In addition, clinical trials successfully used ZF nucleases to combat HIV infection by ex vivo knockout of the CCR5 receptor. In all patients, HIV DNA levels decreased, and in one out of four patients, HIV RNA became undetectable (Tebas et al., N Engl J Med. 2014 Mar. 6; 370(10):901-10). Both of these results demonstrate the promise of programmable nucleases as a new therapeutic platform. The C2c1 effector protein may be applied to a similar system. With respect to the C2c1 protein, the CRISPR-C2c1 system may recognize a PAM sequence that is 5′ TTN 3′ or 5′ ATTN 3′, wherein N is any nucleotide. In some embodiments, the CRISPR-C2c1 system introduces one or more staggered double strand breaks (DSBs) with a 5′ overhang to the target gene. In particular embodiments, the 5′ overhang is 7 nt. In some embodiments, the CRISPR-C2c1 system introduces a template DNA sequence at the staggered DSB via HR or NHEJ. In some particular embodiments, the CRISPR-C2c1 system comprises a catalytically inactivated C2c1 protein associated with a functional domain that modifies the target gene. In a particular embodiment, the CRISPR-C2c1 system introduces a single mutation. In another particular embodiment, the CRISPR-C2c1 system introduces a single nucleotide modification to the transcript.

[1251] In another embodiment, self-inactivating lentiviral vectors with an siRNA targeting a common exon shared by HIV tat/rev, a nucleolar-localizing TAR decoy, and an anti-CCR5-specific hammerhead ribozyme (see, e.g., DiGiusto et al. (2010) Sci Transl Med 2:36ra43) may be used/and or adapted to the CRISPR-Cas system of the present invention. A minimum of 2.5×106 CD34+ cells per kilogram patient weight may be collected and prestimulated for 16 to 20 hours in X-VIVO 15 medium (Lonza) containing 2 μmol/L-glutamine, stem cell factor (100 ng/ml), Flt-3 ligand (Flt-3L) (100 ng/ml), and thrombopoietin (10 ng/ml) (CellGenix) at a density of 2×106 cells/ml. Prestimulated cells may be transduced with lentiviral at a multiplicity of infection of 5 for 16 to 24 hours in 75-cm² tissue culture flasks coated with fibronectin (25 mg/cm²) (RetroNectin, Takara Bio Inc.). The C2c1 effector protein may be applied to a similar system. With respect to the C2c1 protein, the CRISPR-C2c1 system may recognize a PAM sequence that is 5′ TTN 3′ or 5′ ATTN 3′, wherein N is any nucleotide. In some embodiments, the CRISPR-C2c1 system introduces one or more staggered double strand breaks (DSBs) with a 5′ overhang to the target gene. In particular embodiments, the 5′ overhang is 7 nt. In some embodiments, the CRISPR-C2c1 system introduces a template DNA sequence at the staggered DSB via HR or NHEJ. In some particular embodiments, the CRISPR-C2c1 system comprises a catalytically inactivated C2c1 protein associated with a functional domain that modifies the target gene. In a particular embodiment, the CRISPR-C2c1 system introduces a single mutation. In another particular embodiment, the CRISPR-C2c1 system introduces a single nucleotide modification to the transcript.

[1252] With the knowledge in the art and the teachings in this disclosure the skilled person can correct HSCs as to immunodeficiency condition such as HIV/AIDS comprising contacting an HSC with a CRISPR-C2c1 system that targets and knocks out CCR5. An guide RNA (and advantageously a dual guide approach, e.g., a pair of different guide RNAs; for instance, guide RNAs targeting of two clinically relevant genes, B2M and CCR5, in primary human CD4+ T cells and CD34+ hematopoietic stem and progenitor cells (HSPCs)) that targets and knocks out CCR5-and-C2c1 protein containing particle is contacted with HSCs. The so contacted cells can be administered; and optionally treated/expanded; cf. Cartier. See also Kiem, “Hematopoietic stem cell-based gene therapy for HIV disease,” Cell Stem Cell. Feb. 3, 2012; 10(2): 137-147; incorporated herein by reference along with the documents it cites; Mandal et al, “Efficient Ablation of Genes in Human Hematopoietic Stem and Effector Cells using CRISPR/Cas9,” Cell Stem Cell, Volume 15, Issue 5, p643-652, 6 Nov. 2014; incorporated herein by reference along with the documents it cites. Mention is also made of Ebina, “CRISPR/Cas9 system to suppress HIV-1 expression by editing HIV-1 integrated proviral DNA” SCIENTIFIC REPORTS 3: 2510 DOI: 10.1038/srep02510, incorporated herein by reference along with the documents it cites, as another means for combatting HIV/AIDS using a CRISPR-C2c1 system. With respect to the C2c1 protein, the CRISPR-C2c1 system may recognize a PAM sequence that is 5′ TTN 3′ or 5′ ATTN 3′, wherein N is any nucleotide. In some embodiments, the CRISPR-C2c1 system introduces one or more staggered double strand breaks (DSBs) with a 5′ overhang to the target gene. In particular embodiments, the 5′ overhang is 7 nt. In some embodiments, the CRISPR-C2c1 system introduces a template DNA sequence at the staggered DSB via HR or NHEJ. In some particular embodiments, the CRISPR-C2c1 system comprises a catalytically inactivated C2c1 protein associated with a functional domain that modifies the target gene. In a particular embodiment, the CRISPR-C2c1 system introduces a single mutation. In another particular embodiment, the CRISPR-C2c1 system introduces a single nucleotide modification to the transcript.

[1253] The rationale for genome editing for HIV treatment originates from the observation that individuals homozygous for loss of function mutations in CCR5, a cellular co-receptor for the virus, are highly resistant to infection and otherwise healthy, suggesting that mimicking this mutation with genome editing could be a safe and effective therapeutic strategy [Liu, R., et al. Cell 86, 367-377 (1996)]. This idea was clinically validated when an HIV infected patient was given an allogeneic bone marrow transplant from a donor homozygous for a loss of function CCR5 mutation, resulting in undetectable levels of HIV and restoration of normal CD4 T-cell counts [Hutter, G., et al. The New England journal of medicine 360, 692-698 (2009)]. Although bone marrow transplantation is not a realistic treatment strategy for most HIV patients, due to cost and potential graft vs. host disease, HIV therapies that convert a patient's own T-cells into CCR5 are desirable.

[1254] Early studies using ZFNs and NHEJ to knockout CCR5 in humanized mouse models of HIV showed that transplantation of CCR5 edited CD4 T cells improved viral load and CD4 T-cell counts [Perez, E. E., et al. Nature biotechnology 26, 808-816 (2008)]. Importantly, these models also showed that HIV infection resulted in selection for CCR5 null cells, suggesting that editing confers a fitness advantage and potentially allowing a small number of edited cells to create a therapeutic effect.

[1255] As a result of this and other promising preclinical studies, genome editing therapy that knocks out CCR5 in patient T cells has now been tested in humans [Holt, N., et al. Nature biotechnology 28, 839-847 (2010); Li, L., et al. Molecular therapy. the journal of the American Society of Gene Therapy 21, 1259-1269 (2013)]. In a recent phase I clinical trial, CD4+ T cells from patients with HIV were removed, edited with ZFNs designed to knockout the CCR5 gene, and autologously transplanted back into patients [Tebas, P., et al. The New England journal of medicine 370, 901-910 (2014)].

[1256] In another study (Mandal et al., Cell Stem Cell, Volume 15, Issue 5, p643-652, 6 Nov. 2014), CRISPR-Cas9 has targeted two clinical relevant genes, B2M and CCR5, in human CD4+ T cells and CD34+ hematopoietic stem and progenitor cells (HSPCs). Use of single RNA guides led to highly efficient mutagenesis in HSPCs but not in T cells. A dual guide approach improved gene deletion efficacy in both cell types. HSPCs that had undergone genome editing with CRISPR-Cas9 retained multilineage potential. Predicted on- and off-target mutations were examined via target capture sequencing in HSPCs and low levels of off-target mutagenesis were observed at only one site. These results demonstrate that CRISPR-Cas9 can efficiently ablate genes in HSPCs with minimal off-target mutagenesis, which have broad applicability for hematopoietic cell-based therapy.

[1257] Wang et al. (PLoS One. 2014 Dec. 26; 9(12):e115987. doi: 10.1371/journal.pone.0115987) silenced CCR5 via CRISPR associated protein 9 (Cas9) and single guided RNAs (guide RNAs) with lentiviral vectors expressing Cas9 and CCR5 guide RNAs. Wang et al. showed that a single round transduction of lentiviral vectors expressing Cas9 and CCR5 guide RNAs into HIV-1 susceptible human CD4+ cells yields high frequencies of CCR5 gene disruption. CCR5 gene-disrupted cells are not only resistant to R5-tropic HIV-1, including transmitted/founder (T/F) HIV-1 isolates, but also have selective advantage over CCR5 gene-undisrupted cells during R5-tropic HIV-1 infection. Genome mutations at potential off-target sites that are highly homologous to these CCR5 guide RNAs in stably transduced cells even at 84 days post transduction were not detected by a T7 endonuclease I assay.

[1258] Fine et al. (Sci Rep. 2015 Jul. 1; 5:10777. doi: 10.1038/srep10777) identified a two-cassette system expressing pieces of the S. pyogenes Cas9 (SpCas9) protein which splice together in cellula to form a functional protein capable of site-specific DNA cleavage. With specific CRISPR guide strands, Fine et al. demonstrated the efficacy of this system in cleaving the HBB and CCR5 genes in human HEK-293T cells as a single Cas9 and as a pair of Cas9 nickases. The trans-spliced SpCas9 (tsSpCas9) displayed 35% of the nuclease activity compared with the wild-type SpCas9 (wtSpCas9) at standard transfection doses, but had substantially decreased activity at lower dosing levels. The greatly reduced open reading frame length of the tsSpCas9 relative to wtSpCas9 potentially allows for more complex and longer genetic elements to be packaged into an AAV vector including tissue-specific promoters, multiplexed guide RNA expression, and effector domain fusions to SpCas9.

[1259] Li et al. (J Gen Virol. 2015 August; 96(8):2381-93. doi: 10.1099/vir.0.000139. Epub 2015 Apr. 8) demonstrated that CRISPR-Cas9 can efficiently mediate the editing of the CCR5 locus in cell lines, resulting in the knockout of CCR5 expression on the cell surface. Next-generation sequencing revealed that various mutations were introduced around the predicted cleavage site of CCR5. For each of the three most effective guide RNAs that were analyzed, no significant off-target effects were detected at the 15 top-scoring potential sites. By constructing chimeric Ad5F35 adenoviruses carrying CRISPR-Cas9 components, Li et al. efficiently transduced primary CD4+T-lymphocytes and disrupted CCR5 expression, and the positively transduced cells were conferred with HIV-1 resistance.

[1260] One of skill in the art may utilize the above studies of, for example, Holt, N., et al. Nature biotechnology 28, 839-847 (2010), Li, L., et al. Molecular therapy: the journal of the American Society of Gene Therapy 21, 1259-1269 (2013), Mandal et al., Cell Stem Cell, Volume 15, Issue 5, p643-652, 6 Nov. 2014, Wang et al. (PLoS One. 2014 Dec. 26; 9(12):e115987. doi: 10.1371/journal.pone.0115987), Fine et al. (Sci Rep. 2015 Jul. 1; 5:10777. doi: 10.1038/srep10777) and Li et al. (J Gen Virol. 2015 August; 96(8):2381-93. doi: 10.1099/vir.0.000139. Epub 2015 Apr. 8) for targeting CCR5 with the CRISPR Cas system of the present invention. With respect to the C2c1 protein, the CRISPR-C2c1 system may recognize a PAM sequence that is 5′ TTN 3′ or 5′ ATTN 3′, wherein N is any nucleotide. Notably, the T-rich PAM allows application of the present invention in non-dividing cells and tissues. In some embodiments, the CRISPR-C2c1 system introduces one or more staggered double strand breaks (DSBs) with a 5′ overhang to the target gene. In particular embodiments, the 5′ overhang is 7 nt. In some embodiments, the CRISPR-C2c1 system introduces a template DNA sequence at the staggered DSB via HR or NHEJ. In some particular embodiments, the CRISPR-C2c1 system comprises a catalytically inactivated C2c1 protein associated with a functional domain that modifies the target gene. In a particular embodiment, the CRISPR-C2c1 system introduces a single mutation. In another particular embodiment, the CRISPR-C2c1 system introduces a single nucleotide modification to the transcript.

### Treating Pathogens, Like Viral Pathogens, Such as HBV

[1261] The present invention may also be applied to treat hepatitis B virus (HBV). However, the CRISPR Cas system must be adapted to avoid the shortcomings of RNAi, such as the risk of overstating endogenous small RNA pathways, by for example, optimizing dose and sequence (see, e.g., Grimm et al., Nature vol. 441, 26 May 2006). For example, low doses, such as about 1-10×1014 particles per human are contemplated. In another embodiment, the CRISPR Cas system directed against HBV may be administered in liposomes, such as a stable nucleic-acid-lipid particle (SNALP) (see, e.g., Morrissey et al., Nature Biotechnology, Vol. 23, No. 8, August 2005). Daily intravenous injections of about 1, 3 or 5 mg/kg/day of CRISPR Cas targeted to HBV RNA in a SNALP are contemplated. The daily treatment may be over about three days and then weekly for about five weeks. In another embodiment, the system of Chen et al. (Gene Therapy (2007) 14, 11-19) may be used/and or adapted for the CRISPR Cas system of the present invention. Chen et al. use a double-stranded adenoassociated virus 8-pseudotyped vector (dsAAV2/8) to deliver shRNA. A single administration of dsAAV2/8 vector (1×1012 vector genomes per mouse), carrying HBV-specific shRNA, effectively suppressed the steady level of HBV protein, mRNA and replicative DNA in liver of HBV transgenic mice, leading to up to 2-3 log 10 decrease in HBV load in the circulation. Significant HBV suppression sustained for at least 120 days after vector administration. The therapeutic effect of shRNA was target sequence dependent and did not involve activation of interferon. For the present invention, a CRISPR Cas system directed to HBV may be cloned into an AAV vector, such as a dsAAV2/8 vector and administered to a human, for example, at a dosage of about 1×1015 vector genomes to about 1×1016 vector genomes per human. In another embodiment, the method of Wooddell et al. (Molecular Therapy vol. 21 no. 5, 973-985 May 2013) may be used/and or adapted to the CRISPR Cas system of the present invention. Woodell et al. show that simple coinjection of a hepatocyte-targeted, N-acetylgalactosamine-conjugated melittin-like peptide (NAG-MLP) with a liver-tropic cholesterol-conjugated siRNA (chol-siRNA) targeting coagulation factor VII (F7) results in efficient F7 knockdown in mice and nonhuman primates without changes in clinical chemistry or induction of cytokines. Using transient and transgenic mouse models of HBV infection, Wooddell et al. show that a single coinjection of NAG-MLP with potent chol-siRNAs targeting conserved HBV sequences resulted in multilog repression of viral RNA, proteins, and viral DNA with long duration of effect. Intravenous coinjections, for example, of about 6 mg/kg of NAG-MLP and 6 mg/kg of HBV specific CRISPR Cas may be envisioned for the present invention. In the alternative, about 3 mg/kg of NAG-MLP and 3 mg/kg of HBV specific CRISPR Cas may be delivered on day one, followed by administration of about 2-3 mg/kg of NAG-MLP and 2-3 mg/kg of HBV specific CRISPR Cas two weeks later.

[1262] In some embodiments, the target sequence is an HBV sequence. In some embodiments, the target sequences is comprised in an episomal viral nucleic acid molecule which is not integrated into the genome of the organism to thereby manipulate the episomal viral nucleic acid molecule. In some embodiments, the episomal nucleic acid molecule is a double-stranded DNA polynucleotide molecule or is a covalently closed circular DNA (cccDNA). In some embodiments, the CRISPR complex is capable of reducing the amount of episomal viral nucleic acid molecule in a cell of the organism compared to the amount of episomal viral nucleic acid molecule in a cell of the organism in the absence of providing the complex, or is capable of manipulating the episomal viral nucleic acid molecule to promote degradation of the episomal nucleic acid molecule. In some embodiments, the target HBV sequence is integrated into the genome of the organism. In some embodiments, when formed within the cell, the CRISPR complex is capable of manipulating the integrated nucleic acid to promote excision of all or part of the target HBV nucleic acid from the genome of the organism. In some embodiments, said at least one target HBV nucleic acid is comprised in a double-stranded DNA polynucleotide cccDNA molecule and/or viral DNA integrated into the genome of the organism and wherein the CRISPR complex manipulates at least one target HBV nucleic acid to cleave viral cccDNA and/or integrated viral DNA. In some embodiments, said cleavage comprises one or more double-strand break(s) introduced into the viral cccDNA and/or integrated viral DNA, optionally at least two double-strand break(s). In some embodiments, said cleavage is via one or more single-strand break(s) introduced into the viral cccDNA and/or integrated viral DNA, optionally at least two single-strand break(s). In some embodiments, said one or more double-strand break(s) or said one or more single-strand break(s) leads to the formation of one or more insertion or deletion mutations (INDELs) in the viral cccDNA sequences and/or integrated viral DNA sequences. With respect to the C2c1 protein, the CRISPR-C2c1 system may recognize a PAM sequence that is 5′ TTN 3′ or 5′ ATTN 3′, wherein N is any nucleotide. In some embodiments, the CRISPR-C2c1 system introduces one or more staggered double strand breaks (DSBs) with a 5′ overhang to the target gene. In particular embodiments, the 5′ overhang is 7 nt. In some embodiments, the CRISPR-C2c1 system introduces a template DNA sequence at the staggered DSB via HR or NHEJ. In some particular embodiments, the CRISPR-C2c1 system comprises a catalytically inactivated C2c1 protein associated with a functional domain that modifies the target gene. In a particular embodiment, the CRISPR-C2c1 system introduces a single mutation. In another particular embodiment, the CRISPR-C2c1 system introduces a single nucleotide modification to the transcript.

[1263] Lin et al. (Mol Ther Nucleic Acids. 2014 Aug. 19; 3:e186. doi: 10.1038/mtna.2014.38) designed eight gRNAs against HBV of genotype A. With the HBV-specific gRNAs, the CRISPR-Cas9 system significantly reduced the production of HBV core and surface proteins in Huh-7 cells transfected with an HBV-expression vector. Among eight screened gRNAs, two effective ones were identified. One gRNA targeting the conserved HBV sequence acted against different genotypes. Using a hydrodynamics-HBV persistence mouse model, Lin et al. further demonstrated that this system could cleave the intrahepatic HBV genome-containing plasmid and facilitate its clearance in vivo, resulting in reduction of serum surface antigen levels. These data suggest that the CRISPR-Cas9 system could disrupt the HBV-expressing templates both in vitro and in vivo, indicating its potential in eradicating persistent HBV infection.

[1264] Dong et al. (Antiviral Res. 2015 June; 118:110-7. doi: 10.1016/j.antiviral.2015.03.015. Epub 2015 Apr. 3) used the CRISPR-Cas9 system to target the HBV genome and efficiently inhibit HBV infection. Dong et al. synthesized four single-guide RNAs (guide RNAs) targeting the conserved regions of HBV. The expression of these guide RNAS with Cas9 reduced the viral production in Huh7 cells as well as in HBV-replication cell HepG2.2.15. Dong et al. further demonstrated that CRISPR-Cas9 direct cleavage and cleavage-mediated mutagenesis occurred in HBV cccDNA of transfected cells. In the mouse model carrying HBV cccDNA, injection of guide RNA-Cas9 plasmids via rapid tail vein resulted in the low level of cccDNA and HBV protein.

[1265] Liu et al. (J Gen Virol. 2015 August; 96(8):2252-61. doi: 10.1099/vir.0.000159. Epub 2015 Apr. 22) designed eight guide RNAs (gRNAs) that targeted the conserved regions of different HBV genotypes, which could significantly inhibit HBV replication both in vitro and in vivo to investigate the possibility of using the CRISPR-Cas9 system to disrupt the HBV DNA templates. The HBV-specific gRNA/C2c1 system could inhibit the replication of HBV of different genotypes in cells, and the viral DNA was significantly reduced by a single gRNA/C2c1 system and cleared by a combination of different gRNA/C2c1 systems.

[1266] Wang et al. (World J Gastroenterol. 2015 Aug. 28; 21(32):9554-65. doi: 10.3748/wjg.v21.i32.9554) designed 15 gRNAs against HBV of genotypes A-D. Eleven combinations of two above gRNAs (dual-gRNAs) covering the regulatory region of HBV were chosen. The efficiency of each gRNA and 11 dual-gRNAs on the suppression of HBV (genotypes A-D) replication was examined by the measurement of HBV surface antigen (HBsAg) or e antigen (HBeAg) in the culture supernatant. The destruction of HBV-expressing vector was examined in HuH7 cells co-transfected with dual-gRNAs and HBV-expressing vector using polymerase chain reaction (PCR) and sequencing method, and the destruction of cccDNA was examined in HepAD38 cells using KCl precipitation, plasmid-safe ATP-dependent DNase (PSAD) digestion, rolling circle amplification and quantitative PCR combined method. The cytotoxicity of these gRNAs was assessed by a mitochondrial tetrazolium assay. All of gRNAs could significantly reduce HBsAg or HBeAg production in the culture supernatant, which was dependent on the region in which gRNA against. All of dual gRNAs could efficiently suppress HBsAg and/or HBeAg production for HBV of genotypes A-D, and the efficacy of dual gRNAs in suppressing HBsAg and/or HBeAg production was significantly increased when compared to the single gRNA used alone. Furthermore, by PCR direct sequencing we confirmed that these dual gRNAs could specifically destroy HBV expressing template by removing the fragment between the cleavage sites of the two used gRNAs. Most importantly, gRNA-5 and gRNA-12 combination not only could efficiently suppress HBsAg and/or HBeAg production, but also destroy the cccDNA reservoirs in HepAD38 cells.

[1267] Karimova et al. (Sci Rep. 2015 Sep. 3; 5:13734. doi: 10.1038/srep13734) identified cross-genotype conserved HBV sequences in the S and X region of the HBV genome that were targeted for specific and effective cleavage by a Cas9 nickase. This approach disrupted not only episomal cccDNA and chromosomally integrated HBV target sites in reporter cell lines, but also HBV replication in chronically and de novo infected hepatoma cell lines.

[1268] One of skill in the art may utilize the above studies of, for example, Lin et al. (Mol Ther Nucleic Acids. 2014 Aug. 19; 3:e186. doi: 10.1038/mtna.2014.38), Dong et al. (Antiviral Res. 2015 June; 118:110-7. doi: 10.1016/j.antiviral.2015.03.015. Epub 2015 Apr. 3), Liu et al. (J Gen Virol. 2015 August; 96(8):2252-61. doi: 10.1099/vir.0.000159. Epub 2015 Apr. 22), Wang et al. (World J Gastroenterol. 2015 Aug. 28; 21(32):9554-65. doi: 10.3748/wjg.v21.i32.9554) and Karimova et al. (Sci Rep. 2015 Sep. 3; 5:13734. doi: 10.1038/srep13734) for targeting HBV with the CRISPR Cas system of the present invention. With respect to the C2c1 protein, the CRISPR-C2c1 system may recognize a PAM sequence that is 5′ TTN 3′ or 5′ ATTN 3′, wherein N is any nucleotide. In some embodiments, the CRISPR-C2c1 system introduces one or more staggered double strand breaks (DSBs) with a 5′ overhang to the target gene. In particular embodiments, the 5′ overhang is 7 nt. In some embodiments, the CRISPR-C2c1 system introduces a template DNA sequence at the staggered DSB via HR or NHEJ. In some particular embodiments, the CRISPR-C2c1 system comprises a catalytically inactivated C2c1 protein associated with a functional domain that modifies the target gene. In a particular embodiment, the CRISPR-C2c1 system introduces a single mutation. In another particular embodiment, the CRISPR-C2c1 system introduces a single nucleotide modification to the transcript.

[1269] Chronic hepatitis B virus (HBV) infection is prevalent, deadly, and seldom cured due to the persistence of viral episomal DNA (cccDNA) in infected cells. Ramanan et al. (Ramanan V, Shlomai A, Cox D B, Schwartz R E, Michailidis E, Bhatta A, Scott D A, Zhang F, Rice C M, Bhatia S N, Sci Rep. 2015 Jun. 2; 5:10833. doi: 10.1038/srep10833, published online 2 Jun. 2015.) showed that the CRISPR/Cas9 system can specifically target and cleave conserved regions in the HBV genome, resulting in robust suppression of viral gene expression and replication. Upon sustained expression of Cas9 and appropriately chosen guide RNAs, they demonstrated cleavage of cccDNA by Cas9 and a dramatic reduction in both cccDNA and other parameters of viral gene expression and replication. Thus, they showed that directly targeting viral episomal DNA is a novel therapeutic approach to control the virus and possibly cure patients. This is also described in WO2015089465 A1, in the name of The Broad Institute et al., the contents of which are hereby incorporated by reference.

[1270] As such targeting viral episomal DNA in HBV is preferred in some embodiments.

[1271] The present invention may also be applied to treat pathogens, e.g. bacterial, fungal and parasitic pathogens. Most research efforts have focused on developing new antibiotics, which once developed, would nevertheless be subject to the same problems of drug resistance. The invention provides novel CRISPR-based alternatives which overcome those difficulties. Furthermore, unlike existing antibiotics, CRISPR-based treatments can be made pathogen specific, inducing bacterial cell death of a target pathogen while avoiding beneficial bacteria.

[1272] The present invention may also be applied to treat hepatitis C virus (HCV). The methods of Roelvinki et al. (Molecular Therapy vol. 20 no. 9, 1737-1749 September 2012) may be applied to the CRISPR Cas system. For example, an AAV vector such as AAV8 may be a contemplated vector and for example a dosage of about 1.25×1011 to 1.25×1013 vector genomes per kilogram body weight (vg/kg) may be contemplated. The present invention may also be applied to treat pathogens, e.g. bacterial, fungal and parasitic pathogens. Most research efforts have focused on developing new antibiotics, which once developed, would nevertheless be subject to the same problems of drug resistance. The invention provides novel CRISPR-based alternatives which overcome those difficulties. Furthermore, unlike existing antibiotics, CRISPR-based treatments can be made pathogen specific, inducing bacterial cell death of a target pathogen while avoiding beneficial bacteria. In some embodiments, the CRISPR-C2c1 system may recognize a PAM sequence is a T-rich sequence. In some embodiments, the PAM sequence is 5′ TTN 3′ or 5′ ATTN 3′, wherein N is any nucleotide. In some embodiments, the CRISPR-C2c1 system introduces one or more staggered double strand breaks (DSBs) with a 5′ overhang to the target gene. In particular embodiments, the 5′ overhang is 7 nt. In some embodiments, the CRISPR-C2c1 system introduces a template DNA sequence at the staggered DSB via HR or NHEJ. In some particular embodiments, the CRISPR-C2c1 system comprises a catalytically inactivated C2c1 protein associated with a functional domain that modifies the target gene. In a particular embodiment, the CRISPR-C2c1 system introduces a single mutation. In another particular embodiment, the CRISPR-C2c1 system introduces a single nucleotide modification to the transcript.

[1273] Jiang et al. (“RNA-guided editing of bacterial genomes using CRISPR-Cas systems,” Nature Biotechnology vol. 31, p. 233-9, March 2013) used a CRISPR-Cas9 system to mutate or kill S. pneumoniae and E. coli. The work, which introduced precise mutations into the genomes, relied on dual-RNA:Cas9-directed cleavage at the targeted genomic site to kill unmutated cells and circumvented the need for selectable markers or counter-selection systems. CRISPR systems have be used to reverse antibiotic resistance and eliminate the transfer of resistance between strains. Bickard et al. showed that Cas9, reprogrammed to target virulence genes, kills virulent, but not avirulent, S. aureus. Reprogramming the nuclease to target antibiotic resistance genes destroyed staphylococcal plasmids that harbor antibiotic resistance genes and immunized against the spread of plasmid-borne resistance genes. (see, Bikard et al., “Exploiting CRISPR-Cas nucleases to produce sequence-specific antimicrobials,” Nature Biotechnology vol. 32, 1146-1150, doi:10.1038/nbt.3043, published online 5 Oct. 2014.) Bikard showed that CRISPR-Cas9 antimicrobials function in vivo to kill S. aureus in a mouse skin colonization model. Similarly, Yosef et al used a CRISPR system to target genes encoding enzymes that confer resistance to β-lactam antibiotics (see Yousef et al., “Temperate and lytic bacteriophages programmed to sensitize and kill antibiotic-resistant bacteria,” Proc. Natl. Acad. Sci. USA, vol. 112, p. 7267-7272, doi: 10.1073/pnas.1500107112 published online May 18, 2015).

[1274] The present invention may also be applied to development of treatment to norovirus infections. Norovirus is one of the most common pathogens attributed to diarrheal diseases from unsafe food. It is also the primary cause of mortality among young children and adults in foodborne infections. Norovirus is not just a foodborne burden. In a recent meta-analysis, norovirus accounts for nearly one-fifth of all causes of (including person-to-person transmission) acute gastroenteritis in both sporadic and outbreak settings and affects all age groups. Undoubtedly, norovirus is of paramount public health concern in both developed and developing countries. Research efforts to better understand norovirus pathobiology will be necessary for targeted intervention. From Middle East respiratory syndrome coronavirus to Zika virus, efforts to identify host factors important for mediating virus infection has always been a research priority. Such information will shed light on potential therapeutic targets in antiviral intervention. Norovirus virus-host interaction studies have been hampered by the lack of a robust cell culture model in the past 20 years. In 2016, norovirus has finally been successfully cultivated in a stem cell-derived three-dimensional human gut-like structure called enteroid or mini-gut. Chan et. al used intestinal stem cells isolated from duodenal biopsies collected from participants, followed by differentiation into mini-guts. Knockout CRISPR and gain-of-function CRISPR SAM, were used to identify shortlisted candidates of genes involved in norovirus infection. The C2c1-CRISPR system disclosed in this invention may be used in a similar system as in Chan et al. With respect to the C2c1 protein, the CRISPR-C2c1 system may recognize a PAM sequence that is a T-rich sequence. In some embodiments, the PAM sequence is 5′ TTN 3′ or 5′ ATTN 3′, wherein N is any nucleotide. In some embodiments, the CRISPR-C2c1 system introduces one or more staggered double strand breaks (DSBs) with a 5′ overhang to the target gene. In particular embodiments, the 5′ overhang is 7 nt. In some embodiments, the CRISPR-C2c1 system introduces a template DNA sequence at the staggered DSB via HR or NHEJ. In some particular embodiments, the CRISPR-C2c1 system comprises a catalytically inactivated C2c1 protein associated with a functional domain that modifies the target gene. In a particular embodiment, the CRISPR-C2c1 system introduces a single mutation. In another particular embodiment, the CRISPR-C2c1 system introduces a single nucleotide modification to the transcript of the target gene.

[1275] The present invention may also be applied to treat human papillomavirus (HPV) related malignant neoplasm and HPV induced cervical cancer. Cervical cancer is the second most common cancer in women worldwide. High-risk human papillomavirus (HR-HPVs), especially HPV16 and HPV18, is considered major causative agent for cervical cancer. Oncogenes E6 and E7 are expressed in the early stage of HPV infection, and their functions are to disrupt normal cell cycle and to maintain a transformed malignant phenotype. For instance, E7 protein binds to cullin 2 ubiquitin ligase complex and leads to the ubiquitination and degradation of the retinoblastoma (pRb) tumor suppressor.

[1276] Hu et. al (Biomed Res Int. 2014; 2014:612823. doi: 10.1155/2014/61283) used CRISPR-Cas9 system to target HPV16-E7 DNA in HPV positive cell lines and showed that the HPV16-E7 single-guide RNA (sgRNA) guided CRISPR/Cas system could disrupt HPV16-E7 DNA at specific sites, inducing apoptosis and growth inhibition in HPV positive SiHa and Caski cells, but not in HPV negative C33A and HEK293 cells. Moreover, disruption of E7 DNA directly leads to downregulation of E7 protein and upregulation of tumor suppressor protein pRb. gRNAs targeting HPV16-E7 gene was designed following the protocol of Mali et al. and synthesized them in Genewiz Company (China). SSA luciferase reporter pSSA Rep3-1 was used as a reporting system of delivery of the CRISPR system. The cells were cotransfected with 0.8 g of Cas9 plasmid and 0.2 g of gRNA plasmid in 24-well plates. At 48 h after transfection, they were collected and double stained with fluorescein isothiocyanate-(FITC-) conjugated annexin V (annexin V-FITC) and propidium iodide (PI) using an Annexin V-FITC Apoptosis detection kit (KeyGen BioTech) according to the manufacturer's instructions. Apoptosis rates of all of the four CRISPR/Cas system treated cell lines were analyzed using a FACS Calibur (BD Bioscience) to calculate the induced cell death. Data was analyzed using BD Cell Quest software. In vitro cell proliferation was determined using Cell Counting Kit-8 (CCK-8; Beyotime). Transfected with the gRNA-4/Cas9 plasmids with 1×104 cells/well, cells were trypsinized and seeded onto 96-well plates at 24 h after transfection. At 0 h, 24 h, 48 h, 72 h, and 96 h after being seeded onto 96-well plates, 10 L CCK-8 solution was added in each well followed by 2.5 h incubation at 37° C. The CRISPR-C2c1 system disclosed in this invention may be used in a similar system. With respect to the C2c1 protein, the CRISPR-C2c1 system may recognize a PAM sequence that is 5′ TTN 3′ or 5′ ATTN 3′, wherein N is any nucleotide. In some embodiments, the CRISPR-C2c1 system introduces one or more staggered double strand breaks (DSBs) a 5′ overhang to the target gene. In particular embodiments, the 5′ overhang is 7 nt. In some embodiments, the CRISPR-C2c1 system introduces a template DNA sequence at the staggered DSB via HR or NHEJ. In some particular embodiments, the CRISPR-C2c1 system comprises a catalytically inactivated C2c1 protein associated with a functional domain that modifies the target gene. In a particular embodiment, the CRISPR-C2c1 system introduces a single mutation. In another particular embodiment, the CRISPR-C2c1 system introduces a single nucleotide modification to the transcript.

[1277] CRISPR systems can be used to edit genomes of parasites that are resistant to other genetic approaches. For example, a CRISPR-Cas9 system was shown to introduce double-stranded breaks into the in the Plasmodium yoelii genome (see, Zhang et al., “Efficient Editing of Malaria Parasite Genome Using the CRISPR/Cas9 System,” mBio. vol. 5, e01414-14, July-August 2014). Ghorbal et al. (“Genome editing in the human malaria parasite Plasmodium falciparumusing the CRISPR-Cas9 system,” Nature Biotechnology, vol. 32, p. 819-821, doi: 10.1038/nbt.2925, published online Jun. 1, 2014) modified the sequences of two genes, orc1 and kelch13, which have putative roles in gene silencing and emerging resistance to artemisinin, respectively. Parasites that were altered at the appropriate sites were recovered with very high efficiency, despite there being no direct selection for the modification, indicating that neutral or even deleterious mutations can be generated using this system. CRISPR-Cas9 is also used to modify the genomes of other pathogenic parasites, including Toxoplasma gondii (see Shen et al., “Efficient gene disruption in diverse strains of Toxoplasma gondii using CRISPR/CAS9,” mBio vol. 5:e01114-14, 2014; and Sidik et al., “Efficient Genome Engineering of Toxoplasma gondii Using CRISPR/Cas9,” PLoS One vol. 9, e100450, doi: 10.1371/journal.pone.0100450, published online Jun. 27, 2014). The C2c1 effector protein may be applied to a similar system. With respect to the C2c1 protein, the CRISPR-C2c1 system may recognize a PAM sequence that is a T-rich sequence. In some embodiments, the PAM sequence is 5′ TTN 3′ or 5′ ATTN 3′, wherein N is any nucleotide. In some embodiments, the CRISPR-C2c1 system introduces one or more staggered double strand breaks (DSBs) with a 5′ overhang to the target gene. In particular embodiments, the 5′ overhang is 7 nt. In some embodiments, the CRISPR-C2c1 system introduces a template DNA sequence at the staggered DSB via HR or NHEJ. In some particular embodiments, the CRISPR-C2c1 system comprises a catalytically inactivated C2c1 protein associated with a functional domain that modifies the target gene. In a particular embodiment, the CRISPR-C2c1 system introduces a single mutation. In another particular embodiment, the CRISPR-C2c1 system introduces a single nucleotide modification to the transcript.

[1278] Vyas et al. (“A Candida albicans CRISPR system permits genetic engineering of essential genes and gene families,” Science Advances, vol. 1, e1500248, DOI: 10.1126/sciadv.1500248, Apr. 3, 2015) employed a CRISPR system to overcome long-standing obstacles to genetic engineering in C. albicans and efficiently mutate in a single experiment both copies of several different genes. In an organism where several mechanisms contribute to drug resistance, Vyas produced homozygous double mutants that no longer displayed the hyper-resistance to fluconazole or cycloheximide displayed by the parental clinical isolate Can90. Vyas also obtained homozygous loss-of-function mutations in essential genes of C. albicans by creating conditional alleles. Null alleles of DCR1, which is required for ribosomal RNA processing, are lethal at low temperature but viable at high temperature. Vyas used a repair template that introduced a nonsense mutation and isolated dcr1/dcr1 mutants that failed to grow at 16° C. The C2c1 effector protein may be applied to a similar system. With respect to the C2c1 protein, the CRISPR-C2c1 system may recognize a PAM sequence that is a T-rich sequence. In some embodiments, the PAM sequence is 5′ TTN 3′ or 5′ ATTN 3′, wherein N is any nucleotide. In some embodiments, the CRISPR-C2c1 system introduces one or more staggered double strand breaks (DSBs) with a 5′ overhang to the target gene. In particular embodiments, the 5′ overhang is 7 nt. In some embodiments, the CRISPR-C2c1 system introduces a template DNA sequence at the staggered DSB via HR or NHEJ. In some particular embodiments, the CRISPR-C2c1 system comprises a catalytically inactivated C2c1 protein associated with a functional domain that modifies the target gene. In a particular embodiment, the CRISPR-C2c1 system introduces a single mutation. In another particular embodiment, the CRISPR-C2c1 system introduces a single nucleotide modification to the transcript of DCR1. In some embodiments, the repair template does not comprise a PAM sequence.

Treating Diseases with Genetic or Epigenetic Aspects

[1279] The CRISPR-Cas systems of the present invention can be used to correct genetic mutations that were previously attempted with limited success using TALEN and ZFN and have been identified as potential targets for Cas9 systems, including as in published applications of Editas Medicine describing methods to use Cas9 systems to target loci to therapeutically address disesaes with gene therapy, including, WO 2015/048577 CRISPR-RELATED METHODS AND COMPOSITIONS of Gluckmann et al.; WO 2015/070083 CRISPR-RELATED METHODS AND COMPOSITIONS WITH GOVERNING gRNAS of Glucksmann et al.; In some embodiments, the treatment, prophylaxis or diagnosis of Primary Open Angle Glaucoma (POAG) is provided. The target is preferably the MYOC gene. This is described in WO2015153780, the disclosure of which is hereby incorporated by reference.

[1280] Mention is made of WO2015/134812 CRISPR/CAS-RELATED METHODS AND COMPOSITIONS FOR TREATING USHER SYNDROME AND RETINITIS PIGMENTOSA of Maeder et al. Through the teachings herein the invention comprehends methods and materials of these documents applied in conjunction with the teachings herein. In an aspect of ocular and auditory gene therapy, methods and compositions for treating Usher Syndrome and Retinis-Pigmentosa may be adapted to the CRISPR-Cas system of the present invention (see, e.g., WO 2015/134812). In an embodiment, the WO 2015/134812 involves a treatment or delaying the onset or progression of Usher Syndrome type IIA (USH2A, USH11A) and retinitis pigmentosa 39 (RP39) by gene editing, e.g., using CRISPR-Cas9 mediated methods to correct the guanine deletion at position 2299 in the USH2A gene (e.g., replace the deleted guanine residue at position 2299 in the USH2A gene). A similar effect can be achieved with C2c1. In a related aspect, a mutation is targeted by cleaving with either one or more nuclease, one or more nickase, or a combination thereof, e.g., to induce HDR with a donor template that corrects the point mutation (e.g., the single nucleotide, e.g., guanine, deletion). The alteration or correction of the mutant USH2A gene can be mediated by any mechanism. Exemplary mechanisms that can be associated with the alteration (e.g., correction) of the mutant HSH2A gene include, but are not limited to, non-homologous end joining, microhomology-mediated end joining (MMEJ), homology-directed repair (e.g., endogenous donor template mediated), SDSA (synthesis dependent strand annealing), single-strand annealing or single strand invasion. In an embodiment, the method used for treating Usher Syndrome and Retinis-Pigmentosa can include acquiring knowledge of the mutation carried by the subject, e.g., by sequencing the appropriate portion of the USH2A gene.

[1281] Accordingly, in some embodiments, the treatment, prophylaxis or diagnosis of Retinitis Pigmentosa is provided. A number of different genes are known to be associated with or result in Retinitis Pigmentosa, such as RP1, RP2 and so forth. These genes are targeted in some embodiments and either knocked out or repaired through provision of suitable a template. In some embodiments, delivery is to the eye by injection.

[1282] One or more Retinitis Pigmentosa genes can, in some embodiments, be selected from: RP1 (Retinitis pigmentosa-1), RP2 (Retinitis pigmentosa-2), RPGR (Retinitis pigmentosa-3), PRPH2 (Retinitis pigmentosa-7), RP9 (Retinitis pigmentosa-9), IMPDH1 (Retinitis pigmentosa-10), PRPF31 (Retinitis pigmentosa-11), CRB1 (Retinitis pigmentosa-12, autosomal recessive), PRPF8 (Retinitis pigmentosa-13), TULP1 (Retinitis pigmentosa-14), CA4 (Retinitis pigmentosa-17), HPRPF3 (Retinitis pigmentosa-18), ABCA4 (Retinitis pigmentosa-19), EYS (Retinitis pigmentosa-25), CERKL (Retinitis pigmentosa-26), FSCN2 (Retinitis pigmentosa-30), TOPORS (Retinitis pigmentosa-31), SNRNP200 (Retinitis pigmentosa 33), SEMA4A (Retinitis pigmentosa-35), PRCD (Retinitis pigmentosa-36), NR2E3 (Retinitis pigmentosa-37), MERTK (Retinitis pigmentosa-38), USH2A (Retinitis pigmentosa-39), PROM1 (Retinitis pigmentosa-41), KLHL7 (Retinitis pigmentosa-42), CNGB1 (Retinitis pigmentosa-45), BEST1 (Retinitis pigmentosa-50), TTC8 (Retinitis pigmentosa 51), C2orf71 (Retinitis pigmentosa 54), ARL6 (Retinitis pigmentosa 55), ZNF513 (Retinitis pigmentosa 58), DHDDS (Retinitis pigmentosa 59), BEST1 (Retinitis pigmentosa, concentric), PRPH2 (Retinitis pigmentosa, digenic), LRAT (Retinitis pigmentosa, juvenile), SPATA7 (Retinitis pigmentosa, juvenile, autosomal recessive), CRX (Retinitis pigmentosa, late-onset dominant), and/or RPGR (Retinitis pigmentosa, X-linked, and sinorespiratory infections, with or without deafness).

[1283] In some embodiments, the Retinitis Pigmentosa gene is MERTK (Retinitis pigmentosa-38) or USH2A (Retinitis pigmentosa-39).

[1284] Mention is also made of WO 2015/138510 and through the teachings herein the invention (using a CRISPR-Cas9 system) comprehends providing a treatment or delaying the onset or progression of Leber's Congenital Amaurosis 10 (LCA 10). LCA 10 is caused by a mutation in the CEP290 gene, e.g., a c.2991+1655, adenine to guanine mutation in the CEP290 gene which gives rise to a cryptic splice site in intron 26. This is a mutation at nucleotide 1655 of intron 26 of CEP290, e.g., an A to G mutation. CEP290 is also known as: CT87; MKS4; POC3; rd16; BBS14; JBTS5; LCAJO; NPHP6; SLSN6; and 3H11Ag (see, e.g., WO 2015/138510). In an aspect of gene therapy, the invention involves introducing one or more breaks near the site of the LCA target position (e.g., c.2991+1655; A to G) in at least one allele of the CEP290 gene. Altering the LCA10 target position refers to (1) break-induced introduction of an indel (also referred to herein as NHEJ-mediated introduction of an indel) in close proximity to or including a LCA10 target position (e.g., c.2991+1655A to G), or (2) break-induced deletion (also referred to herein as NHEJ-mediated deletion) of genomic sequence including the mutation at a LCA10 target position (e.g., c.2991+1655A to G). Both approaches give rise to the loss or destruction of the cryptic splice site resulting from the mutation at the LCA 10 target position. Accordingly, the use of C2c1 in the treatment of LCA is specifically envisaged.

[1285] Researchers are contemplating whether gene therapies could be employed to treat a wide range of diseases. The CRISPR systems of the present invention based on C2c1 effector protein are envisioned for such therapeutic uses, including, but noted limited to further exemplified targeted areas and with delivery methods as below. With respect to the C2c1 protein, the CRISPR-C2c1 system may recognize a PAM sequence that is a T-rich sequence. In some embodiments, the PAM sequence is 5′ TTN 3′ or 5′ ATTN 3′, wherein N is any nucleotide. In some embodiments, the CRISPR-C2c1 system introduces one or more staggered double strand breaks (DSBs) with a 5′ overhang to the target gene. In particular embodiments, the 5′ overhang is 7 nt. In some embodiments, the CRISPR-C2c1 system introduces a template DNA sequence at the staggered DSB via HR or NHEJ. In some particular embodiments, the CRISPR-C2c1 system comprises a catalytically inactivated C2c1 protein associated with a functional domain that modifies the target gene. In a particular embodiment, the CRISPR-C2c1 system introduces a single mutation. In another particular embodiment, the CRISPR-C2c1 system introduces a single nucleotide modification to the transcript of the target gene. Some examples of conditions or diseases that might be usefully treated using the present system are included in the examples of genes and references included herein and are currently associated with those conditions are also provided there. The genes and conditions exemplified are not exhaustive.

### Treating Diseases of the Circulatory System

[1286] The present invention also contemplates delivering the CRISPR-Cas system, specifically the novel CRISPR effector protein systems described herein, to the blood or hematopoietic stem cells. The plasma exosomes of Wahlgren et al. (Nucleic Acids Research, 2012, Vol. 40, No. 17 e130) were previously described and may be utilized to deliver the CRISPR Cas system to the blood. The nucleic acid-targeting system of the present invention is also contemplated to treat hemoglobinopathies, such as thalassemias and sickle cell disease. See, e.g., International Patent Publication No. WO 2013/126794 for potential targets that may be targeted by the CRISPR Cas system of the present invention.

[1287] Drakopoulou, “Review Article, The Ongoing Challenge of Hematopoietic Stem Cell-Based Gene Therapy for 0-Thalassemia,” Stem Cells International, Volume 2011, Article ID 987980, 10 pages, doi:10.4061/2011/987980, incorporated herein by reference along with the documents it cites, as if set out in full, discuss modifying HSCs using a lentivirus that delivers a gene for β-globin or γ-globin. In contrast to using lentivirus, with the knowledge in the art and the teachings in this disclosure, the skilled person can correct HSCs as to 3-Thalassemia using a CRISPR-Cas system that targets and corrects the mutation (e.g., with a suitable HDR template that delivers a coding sequence for β-globin or γ-globin, advantageously non-sickling β-globin or -globin); specifically, the guide RNA can target mutation that give rise to β-Thalassemia, and the HDR can provide coding for proper expression of β-globin or γ-globin. An guide RNA that targets the mutation-and-Cas protein containing particle is contacted with HSCs carrying the mutation. The particle also can contain a suitable HDR template to correct the mutation for proper expression of β-globin or γ-globin; or the HSC can be contacted with a second particle or a vector that contains or delivers the HDR template. The so contacted cells can be administered; and optionally treated/expanded; cf. Cartier. In this regard mention is made of: Cavazzana, “Outcomes of Gene Therapy for 0-Thalassemia Major via Transplantation of Autologous Hematopoietic Stem Cells Transduced Ex Vivo with a Lentiviral PA-T87Q-Globin Vector.” tif2014.org/abstractFiles/Jean %20Antoine %20Ribeil_Abstract.pdf; Cavazzana-Calvo, “Transfusion independence and HMGA2 activation after gene therapy of human 0-thalassaemia”, Nature 467, 318-322 (16 Sep. 2010) doi:10.1038/nature09328; Nienhuis, “Development of Gene Therapy for Thalassemia, Cold Spring Harbor Perpsectives in Medicine, doi: 10.1101/cshperspect.a011833 (2012), LentiGlobin BB305, a lentiviral vector containing an engineered β-globin gene (PA-T87Q); and Xie et al., “Seamless gene correction of β-thalassaemia mutations in patient-specific iPSCs using CRISPR/Cas9 and piggyback” Genome Research gr.173427.114 (2014) www.genome.org/cgi/doi/10.1101/gr.173427.114 (Cold Spring Harbor Laboratory Press); that is the subject of Cavazzana work involving human β-thalassaemia and the subject of the Xie work, are all incorporated herein by reference, together with all documents cited therein or associated therewith. In the instant invention, the HDR template can provide for the HSC to express an engineered β-globin gene (e.g., PA-T87Q), or β-globin as in Xie.

[1288] Xu et al. (Sci Rep. 2015 Jul. 9; 5:12065. doi: 10.1038/srepl2065) have designed TALENs and CRISPR-Cas9 to directly target the intron2 mutation site IVS2-654 in the globin gene. Xu et al. observed different frequencies of double-strand breaks (DSBs) at IVS2-654 loci using TALENs and CRISPR-Cas9, and TALENs mediated a higher homologous gene targeting efficiency compared to CRISPR-Cas9 when combined with the piggyBac transposon donor. In addition, more obvious off-target events were observed for CRISPR-Cas9 compared to TALENs. Finally, TALENs-corrected iPSC clones were selected for erythroblast differentiation using the OP9 co-culture system and detected relatively higher transcription of HBB than the uncorrected cells.

[1289] Song et al. (Stem Cells Dev. 2015 May 1; 24(9):1053-65. doi: 10.1089/scd.2014.0347. Epub 2015 Feb. 5) used CRISPR/Cas9 to correct β-Thal iPSCs; gene-corrected cells exhibit normal karyotypes and full pluripotency as human embryonic stem cells (hESCs) showed no off-targeting effects. Then, Song et al. evaluated the differentiation efficiency of the gene-corrected β-Thal iPSCs. Song et al. found that during hematopoietic differentiation, gene-corrected β-Thal iPSCs showed an increased embryoid body ratio and various hematopoietic progenitor cell percentages. More importantly, the gene-corrected β-Thal iPSC lines restored HBB expression and reduced reactive oxygen species production compared with the uncorrected group. Song et al.'s study suggested that hematopoietic differentiation efficiency of β-Thal iPSCs was greatly improved once corrected by the CRISPR-Cas9 system. Similar methods may be performed utilizing the CRISPR-Cas systems described herein, e.g. systems comprising C2c1 effector proteins.

[1290] Sickle cell anemia is an autosomal recessive genetic disease in which red blood cells become sickle-shaped. It is caused by a single base substitution in the β-globin gene, which is located on the short arm of chromosome 11. As a result, valine is produced instead of glutamic acid causing the production of sickle hemoglobin (HbS). This results in the formation of a distorted shape of the erythrocytes. Due to this abnormal shape, small blood vessels can be blocked, causing serious damage to the bone, spleen and skin tissues. This may lead to episodes of pain, frequent infections, hand-foot syndrome or even multiple organ failure. The distorted erythrocytes are also more susceptible to hemolysis, which leads to serious anemia. As in the case of β-thalassaemia, sickle cell anemia can be corrected by modifying HSCs with the CRISPR-Cas system. The system allows the specific editing of the cell's genome by cutting its DNA and then letting it repair itself. The Cas protein is inserted and directed by a RNA guide to the mutated point and then it cuts the DNA at that point. Simultaneously, a healthy version of the sequence is inserted. This sequence is used by the cell's own repair system to fix the induced cut. In this way, the CRISPR-Cas allows the correction of the mutation in the previously obtained stem cells. With the knowledge in the art and the teachings in this disclosure, the skilled person can correct HSCs as to sickle cell anemia using a CRISPR-Cas system that targets and corrects the mutation (e.g., with a suitable HDR template that delivers a coding sequence for β-globin, advantageously non-sickling β-globin); specifically, the guide RNA can target mutation that give rise to sickle cell anemia, and the HDR can provide coding for proper expression of β-globin. An guide RNA that targets the mutation-and-Cas protein containing particle is contacted with HSCs carrying the mutation. The particle also can contain a suitable HDR template to correct the mutation for proper expression of β-globin; or the HSC can be contacted with a second particle or a vector that contains or delivers the HDR template. The so contacted cells can be administered; and optionally treated/expanded; cf. Cartier. The HDR template can provide for the HSC to express an engineered β-globin gene (e.g., PA-T87Q), or β-globin as in Xie.

[1291] Williams, “Broadening the Indications for Hematopoietic Stem Cell Genetic Therapies,” Cell Stem Cell 13:263-264 (2013), incorporated herein by reference along with the documents it cites, as if set out in full, report lentivirus-mediated gene transfer into HSC/P cells from patients with the lysosomal storage disease metachromatic leukodystrophy disease (MLD), a genetic disease caused by deficiency of arylsulfatase A (ARSA), resulting in nerve demyelination; and lentivirus-mediated gene transfer into HSCs of patients with Wiskott-Aldrich syndrome (WAS) (patients with defective WAS protein, an effector of the small GTPase CDC42 that regulates cytoskeletal function in blood cell lineages and thus suffer from immune deficiency with recurrent infections, autoimmune symptoms, and thrombocytopenia with abnormally small and dysfunctional platelets leading to excessive bleeding and an increased risk of leukemia and lymphoma). In contrast to using lentivirus, with the knowledge in the art and the teachings in this disclosure, the skilled person can correct HSCs as to MILD (deficiency of arylsulfatase A (ARSA)) using a CRISPR-Cas system that targets and corrects the mutation (deficiency of arylsulfatase A (ARSA)) (e.g., with a suitable HDR template that delivers a coding sequence for ARSA); specifically, the guide RNA can target mutation that gives rise to MILD (deficient ARSA), and the HDR can provide coding for proper expression of ARSA. An guide RNA that targets the mutation-and-Cas protein containing particle is contacted with HSCs carrying the mutation. The particle also can contain a suitable HDR template to correct the mutation for proper expression of ARSA; or the HSC can be contacted with a second particle or a vector that contains or delivers the HDR template. The so contacted cells can be administered; and optionally treated/expanded; cf. Cartier. In contrast to using lentivirus, with the knowledge in the art and the teachings in this disclosure, the skilled person can correct HSCs as to WAS using a CRISPR-Cas system that targets and corrects the mutation (deficiency of WAS protein) (e.g., with a suitable HDR template that delivers a coding sequence for WAS protein); specifically, the guide RNA can target mutation that gives rise to WAS (deficient WAS protein), and the HDR can provide coding for proper expression of WAS protein. An guide RNA that targets the mutation-and-C2c1 protein containing particle is contacted with HSCs carrying the mutation. The particle also can contain a suitable HDR template to correct the mutation for proper expression of WAS protein; or the HSC can be contacted with a second particle or a vector that contains or delivers the HDR template. The so contacted cells can be administered; and optionally treated/expanded; cf. Cartier.

[1292] Watts, “Hematopoietic Stem Cell Expansion and Gene Therapy” Cytotherapy 13(10):1164-1171. doi:10.3109/14653249.2011.620748 (2011), incorporated herein by reference along with the documents it cites, as if set out in full, discusses hematopoietic stem cell (HSC) gene therapy, e.g., virus-mediated HSC gene therapy, as an highly attractive treatment option for many disorders including hematologic conditions, immunodeficiencies including HIV/AIDS, and other genetic disorders like lysosomal storage diseases, including SCID-X1, ADA-SCID, β-thalassemia, X-linked CGD, Wiskott-Aldrich syndrome, Fanconi anemia, adrenoleukodystrophy (ALD), and metachromatic leukodystrophy (MLD).

[1293] US Patent Publication Nos. 20110225664, 20110091441, 20100229252, 20090271881 and 20090222937 assigned to Cellectis, relates to CREI variants, wherein at least one of the two I-CreI monomers has at least two substitutions, one in each of the two functional subdomains of the LAGLIDADG (SEQ ID NO: 26) core domain situated respectively from positions 26 to 40 and 44 to 77 of I-CreI, said variant being able to cleave a DNA target sequence from the human interleukin-2 receptor gamma chain (IL2RG) gene also named common cytokine receptor gamma chain gene or gamma C gene. The target sequences identified in US Patent Publication Nos. 20110225664, 20110091441, 20100229252, 20090271881 and 20090222937 may be utilized for the nucleic acid-targeting system of the present invention.

[1294] Severe Combined Immune Deficiency (SCID) results from a defect in lymphocytes T maturation, always associated with a functional defect in lymphocytes B (Cavazzana-Calvo et al., Annu. Rev. Med., 2005, 56, 585-602; Fischer et al., Immunol. Rev., 2005, 203, 98-109). Overall incidence is estimated to 1 in 75 000 births. Patients with untreated SCID are subject to multiple opportunist micro-organism infections, and do generally not live beyond one year. SCID can be treated by allogenic hematopoietic stem cell transfer, from a familial donor. Histocompatibility with the donor can vary widely. In the case of Adenosine Deaminase (ADA) deficiency, one of the SCID forms, patients can be treated by injection of recombinant Adenosine Deaminase enzyme.

[1295] Since the ADA gene has been shown to be mutated in SCID patients (Giblett et al., Lancet, 1972, 2, 1067-1069), several other genes involved in SCID have been identified (Cavazzana-Calvo et al., Annu. Rev. Med., 2005, 56, 585-602; Fischer et al., Immunol. Rev., 2005, 203, 98-109). There are four major causes for SCID: (i) the most frequent form of SCID, SCID-X1 (X-linked SCID or X-SCID), is caused by mutation in the IL2RG gene, resulting in the absence of mature T lymphocytes and NK cells. IL2RG encodes the gamma C protein (Noguchi, et al., Cell, 1993, 73, 147-157), a common component of at least five interleukin receptor complexes. These receptors activate several targets through the JAK3 kinase (Macchi et al., Nature, 1995, 377, 65-68), which inactivation results in the same syndrome as gamma C inactivation; (ii) mutation in the ADA gene results in a defect in purine metabolism that is lethal for lymphocyte precursors, which in turn results in the quasi absence of B, T and NK cells; (iii) V(D)J recombination is an essential step in the maturation of immunoglobulins and T lymphocytes receptors (TCRs). Mutations in Recombination Activating Gene 1 and 2 (RAG1 and RAG2) and Artemis, three genes involved in this process, result in the absence of mature T and B lymphocytes; and (iv) Mutations in other genes such as CD45, involved in T cell specific signaling have also been reported, although they represent a minority of cases (Cavazzana-Calvo et al., Annu. Rev. Med., 2005, 56, 585-602; Fischer et al., Immunol. Rev., 2005, 203, 98-109). Since when their genetic bases have been identified, the different SCID forms have become a paradigm for gene therapy approaches (Fischer et al., Immunol. Rev., 2005, 203, 98-109) for two major reasons. First, as in all blood diseases, an ex vivo treatment can be envisioned. Hematopoietic Stem Cells (HSCs) can be recovered from bone marrow, and keep their pluripotent properties for a few cell divisions. Therefore, they can be treated in vitro, and then reinjected into the patient, where they repopulate the bone marrow. Second, since the maturation of lymphocytes is impaired in SCID patients, corrected cells have a selective advantage. Therefore, a small number of corrected cells can restore a functional immune system. This hypothesis was validated several times by (i) the partial restoration of immune functions associated with the reversion of mutations in SCID patients (Hirschhorn et al., Nat. Genet., 1996, 13, 290-295; Stephan et al., N. Engl. J. Med., 1996, 335, 1563-1567; Bousso et al., Proc. Natl., Acad. Sci. USA, 2000, 97, 274-278; Wada et al., Proc. Natl. Acad. Sci. USA, 2001, 98, 8697-8702; Nishikomori et al., Blood, 2004, 103, 4565-4572), (ii) the correction of SCID-X1 deficiencies in vitro in hematopoietic cells (Candotti et al., Blood, 1996, 87, 3097-3102; Cavazzana-Calvo et al., Blood, 1996, Blood, 88, 3901-3909; Taylor et al., Blood, 1996, 87, 3103-3107; Hacein-Bey et al., Blood, 1998, 92, 4090-4097), (iii) the correction of SCID-X1 (Soudais et al., Blood, 2000, 95, 3071-3077; Tsai et al., Blood, 2002, 100, 72-79), JAK-3 (Bunting et al., Nat. Med., 1998, 4, 58-64; Bunting et al., Hum. Gene Ther., 2000, 11, 2353-2364) and RAG2 (Yates et al., Blood, 2002, 100, 3942-3949) deficiencies in vivo in animal models and (iv) by the result of gene therapy clinical trials (Cavazzana-Calvo et al., Science, 2000, 288, 669-672; Aiuti et al., Nat. Med., 2002; 8, 423-425; Gaspar et al., Lancet, 2004, 364, 2181-2187).

[1296] US Patent Publication No. 20110182867 assigned to the Children's Medical Center Corporation and the President and Fellows of Harvard College relates to methods and uses of modulating fetal hemoglobin expression (HbF) in a hematopoietic progenitor cells via inhibitors of BCL11A expression or activity, such as RNAi and antibodies. The targets disclosed in US Patent Publication No. 20110182867, such as BCL11A, may be targeted by the CRISPR Cas system of the present invention for modulating fetal hemoglobin expression. See also Bauer et al. (Science 11 Oct. 2013: Vol. 342 no. 6155 pp. 253-257) and Xu et al. (Science 18 Nov. 2011: Vol. 334 no. 6058 pp. 993-996) for additional BCL11A targets.

[1297] With the knowledge in the art and the teachings in this disclosure, the skilled person may correct HSCs as to a genetic hematologic disorder, e.g., β-Thalassemia, Hemophilia, or a genetic lysosomal storage disease with the C2c1-CRISPR system disclosed in this invention and the CRISPR Cas system as described above. With respect to the C2c1 protein, the CRISPR-C2c1 system may recognize a PAM sequence that is a T-rich sequence. In some embodiments, the PAM sequence is 5′ TTN 3′ or 5′ ATTN 3′, wherein N is any nucleotide. In some embodiments, the CRISPR-C2c1 system introduces one or more staggered double strand breaks (DSBs) with a 5′ overhang to the target gene. In particular embodiments, the 5′ overhang is 7 nt. In some embodiments, the CRISPR-C2c1 system introduces a template DNA sequence at the staggered DSB via HR or NHEJ. In some particular embodiments, the CRISPR-C2c1 system comprises a catalytically inactivated C2c1 protein associated with a functional domain that modifies the target gene. In a particular embodiment, the CRISPR-C2c1 system introduces a single mutation. In another particular embodiment, the CRISPR-C2c1 system introduces a single nucleotide modification to the transcript of the target gene.

### HSC—Delivery to and Editing of Hematopoietic Stem Cells; and Particular Conditions.

[1298] The term “Hematopoietic Stem Cell” or “HSC” is meant to include broadly those cells considered to be an HSC, e.g., blood cells that give rise to all the other blood cells and are derived from mesoderm; located in the red bone marrow, which is contained in the core of most bones. HSCs of the invention include cells having a phenotype of hematopoietic stem cells, identified by small size, lack of lineage (lin) markers, and markers that belong to the cluster of differentiation series, like: CD34, CD38, CD90, CD133, CD105, CD45, and also c-kit,—the receptor for stem cell factor. Hematopoietic stem cells are negative for the markers that are used for detection of lineage commitment, and are, thus, called Lin-; and, during their purification by FACS, a number of up to 14 different mature blood-lineage markers, e.g., CD13 & CD33 for myeloid, CD71 for erythroid, CD19 for B cells, CD61 for megakaryocytic, etc. for humans; and, B220 (murine CD45) for B cells, Mac-1 (CD11b/CD18) for monocytes, Gr-1 for Granulocytes, Tern19 for erythroid cells, Il7Ra, CD3, CD4, CD5, CD8 for T cells, etc. Mouse HSC markers: CD34lo/−, SCA-1+, Thy1.1+/lo, CD38+, C-kit+, lin−, and Human HSC markers: CD34+, CD59+, Thy1/CD90+, CD38lo/−, C-kit/CD117+, and lin−. HSCs are identified by markers. Hence in embodiments discussed herein, the HSCs can be CD34+ cells. HSCs can also be hematopoietic stem cells that are CD34−/CD38−. Stem cells that may lack c-kit on the cell surface that are considered in the art as HSCs are within the ambit of the invention, as well as CD133+ cells likewise considered HSCs in the art.

[1299] The CRISPR-Cas (eg C2c1) system may be engineered to target genetic locus or loci in HSCs. Cas (eg C2c1) protein, advantageously codon-optimized for a eukaryotic cell and especially a mammalian cell, e.g., a human cell, for instance, HSC, and sgRNA targeting a locus or loci in HSC, e.g., the gene EMX1, may be prepared. These may be delivered via particles. The particles may be formed by the Cas (eg C2c1) protein and the gRNA being admixed. The gRNA and Cas (eg C2c1) protein mixture may for example be admixed with a mixture comprising or consisting essentially of or consisting of surfactant, phospholipid, biodegradable polymer, lipoprotein and alcohol, whereby particles containing the gRNA and Cas (eg C2c1) protein may be formed. The invention comprehends so making particles and particles from such a method as well as uses thereof. With respect to the C2c1 protein, the CRISPR-C2c1 system may recognize a PAM sequence that is a T-rich sequence. In some embodiments, the PAM sequence is 5′ TTN 3′ or 5′ ATTN 3′, wherein N is any nucleotide. In some embodiments, the CRISPR-C2c1 system introduces one or more staggered double strand breaks (DSBs) with a 5′ overhang to the target gene. In particular embodiments, the 5′ overhang is 7 nt. In some embodiments, the CRISPR-C2c1 system introduces a template DNA sequence at the staggered DSB via HR or NHEJ. In some particular embodiments, the CRISPR-C2c1 system comprises a catalytically inactivated C2c1 protein associated with a functional domain that modifies the target gene. In a particular embodiment, the CRISPR-C2c1 system introduces a single mutation. In another particular embodiment, the CRISPR-C2c1 system introduces a single nucleotide modification to the transcript of the target gene.

[1300] More generally, particles may be formed using an efficient process. First, Cas (eg C2c1) protein and gRNA targeting the gene EMX1 or the control gene LacZ may be mixed together at a suitable, e.g., 3:1 to 1:3 or 2:1 to 1:2 or 1:1 molar ratio, at a suitable temperature, e.g., 15-30 C, e.g., 20-25 C, e.g., room temperature, for a suitable time, e.g., 15-45, such as 30 minutes, advantageously in sterile, nuclease free buffer, e.g., 1×PBS. Separately, particle components such as or comprising: a surfactant, e.g., cationic lipid, e.g., 1,2-dioleoyl-3-trimethylammonium-propane (DOTAP); phospholipid, e.g., dimyristoylphosphatidylcholine (DMPC); biodegradable polymer, such as an ethylene-glycol polymer or PEG, and a lipoprotein, such as a low-density lipoprotein, e.g., cholesterol may be dissolved in an alcohol, advantageously a C1-6 alkyl alcohol, such as methanol, ethanol, isopropanol, e.g., 100% ethanol. The two solutions may be mixed together to form particles containing the Cas (eg C2c1)-gRNA complexes. In certain embodiments the particle can contain an HDR template. That can be a particle co-administered with gRNA+Cas (eg C2c1) protein-containing particle, or i.e., in addition to contacting an HSC with an gRNA+Cas (eg C2c1) protein-containing particle, the HSC is contacted with a particle containing an HDR template; or the HSC is contacted with a particle containing all of the gRNA, Cas (eg C2c1) and the HDR template. The HDR template can be administered by a separate vector, whereby in a first instance the particle penetrates an HSC cell and the separate vector also penetrates the cell, wherein the HSC genome is modified by the gRNA+Cas (eg C2c1) and the HDR template is also present, whereby a genomic loci is modified by the HDR; for instance, this may result in correcting a mutation.

[1301] After the particles form, HSCs in 96 well plates may be transfected with 15 ug Cas (eg C2c1) protein per well. Three days after transfection, HSCs may be harvested, and the number of insertions and deletions (indels) at the EMX1 locus may be quantified.

[1302] This illustrates how HSCs can be modified using CRISPR-Cas (eg C2c1) targeting a genomic locus or loci of interest in the HSC. The HSCs that are to be modified can be in vivo, i.e., in an organism, for example a human or a non-human eukaryote, e.g., animal, such as fish, e.g., zebra fish, mammal, e.g., primate, e.g., ape, chimpanzee, macaque, rodent, e.g., mouse, rabbit, rat, canine or dog, livestock (cow/bovine, sheep/ovine, goat or pig), fowl or poultry, e.g., chicken. The HSCs that are to be modified can be in vitro, i.e., outside of such an organism. And, modified HSCs can be used ex vivo, i.e., one or more HSCs of such an organism can be obtained or isolated from the organism, optionally the HSC(s) can be expanded, the HSC(s) are modified by a composition comprising a CRISPR-Cas (eg C2c1) that targets a genetic locus or loci in the HSC, e.g., by contacting the HSC(s) with the composition, for instance, wherein the composition comprises a particle containing the CRISPR enzyme and one or more gRNA that targets the genetic locus or loci in the HSC, such as a particle obtained or obtainable from admixing an gRNA and Cas (eg C2c1) protein mixture with a mixture comprising or consisting essentially of or consisting of surfactant, phospholipid, biodegradable polymer, lipoprotein and alcohol (wherein one or more gRNA targets the genetic locus or loci in the HSC), optionally expanding the resultant modified HSCs and administering to the organism the resultant modified HSCs. In some instances the isolated or obtained HSCs can be from a first organism, such as an organism from a same species as a second organism, and the second organism can be the organism to which the resultant modified HSCs are administered, e.g., the first organism can be a donor (such as a relative as in a parent or sibling) to the second organism. Modified HSCs can have genetic modifications to address or alleviate or reduce symptoms of a disease or condition state of an individual or subject or patient. Modified HSCs, e.g., in the instance of a first organism donor to a second organism, can have genetic modifications to have the HSCs have one or more proteins e.g. surface markers or proteins more like that of the second organism. Modified HSCs can have genetic modifications to simulate a disease or condition state of an individual or subject or patient and would be readministered to a non-human organism so as to prepare an animal model. Expansion of HSCs is within the ambit of the skilled person from this disclosure and knowledge in the art, see e.g., Lee, “Improved ex vivo expansion of adult hematopoietic stem cells by overcoming CUL4-mediated degradation of HOXB4.” Blood. 2013 May 16; 121(20):4082-9. doi: 10.1182/blood-2012-09-455204. Epub 2013 Mar. 21.

[1303] As indicated to improve activity, gRNA may be pre-complexed with the Cas (eg C2c1) protein, before formulating the entire complex in a particle. Formulations may be made with a different molar ratio of different components known to promote delivery of nucleic acids into cells (e.g. 1,2-dioleoyl-3-trimethylammonium-propane (DOTAP), 1,2-ditetradecanoyl-sn-glycero-3-phosphocholine (DMPC), polyethylene glycol (PEG), and cholesterol) For example DOTAP:DMPC:PEG:Cholesterol Molar Ratios may be DOTAP 100, DMPC 0, PEG 0, Cholesterol 0; or DOTAP 90, DMPC 0, PEG 10, Cholesterol 0; or DOTAP 90, DMPC 0, PEG 5, Cholesterol 5. DOTAP 100, DMPC 0, PEG 0, Cholesterol 0. The invention accordingly comprehends admixing gRNA, Cas (eg C2c1) protein and components that form a particle; as well as particles from such admixing.

[1304] In a preferred embodiment, particles containing the Cas (eg C2c1)-gRNA complexes may be formed by mixing Cas (eg C2c1) protein and one or more gRNAs together, preferably at a 1:1 molar ratio, enzyme: guide RNA. Separately, the different components known to promote delivery of nucleic acids (e.g. DOTAP, DMPC, PEG, and cholesterol) are dissolved, preferably in ethanol. The two solutions are mixed together to form particles containing the Cas (eg C2c1)-gRNA complexes. After the particles are formed, Cas (eg C2c1)-gRNA complexes may be transfected into cells (e.g. HSCs). Bar coding may be applied. The particles, the Cas and/or the gRNA may be barcoded.

[1305] The invention in an embodiment comprehends a method of preparing an gRNA-and-Cas (eg C2c1) protein containing particle comprising admixing an gRNA and Cas (eg C2c1) protein mixture with a mixture comprising or consisting essentially of or consisting of surfactant, phospholipid, biodegradable polymer, lipoprotein and alcohol. An embodiment comprehends an gRNA-and-Cas (eg C2c1) protein containing particle from the method. The invention in an embodiment comprehends use of the particle in a method of modifying a genomic locus of interest, or an organism or a non-human organism by manipulation of a target sequence in a genomic locus of interest, comprising contacting a cell containing the genomic locus of interest with the particle wherein the gRNA targets the genomic locus of interest; or a method of modifying a genomic locus of interest, or an organism or a non-human organism by manipulation of a target sequence in a genomic locus of interest, comprising contacting a cell containing the genomic locus of interest with the particle wherein the gRNA targets the genomic locus of interest. In these embodiments, the genomic locus of interest is advantageously a genomic locus in an HSC.

[1306] Considerations for Therapeutic Applications: A consideration in genome editing therapy is the choice of sequence-specific nuclease, such as a variant of a C2c1 nuclease. Each nuclease variant may possess its own unique set of strengths and weaknesses, many of which must be balanced in the context of treatment to maximize therapeutic benefit. Thus far, two therapeutic editing approaches with nucleases have shown significant promise: gene disruption and gene correction. Gene disruption involves stimulation of NHEJ to create targeted indels in genetic elements, often resulting in loss of function mutations that are beneficial to patients. In contrast, gene correction uses HDR to directly reverse a disease causing mutation, restoring function while preserving physiological regulation of the corrected element. HDR may also be used to insert a therapeutic transgene into a defined ‘safe harbor’ locus in the genome to recover missing gene function. For a specific editing therapy to be efficacious, a sufficiently high level of modification must be achieved in target cell populations to reverse disease symptoms. This therapeutic modification ‘threshold’ is determined by the fitness of edited cells following treatment and the amount of gene product necessary to reverse symptoms. With regard to fitness, editing creates three potential outcomes for treated cells relative to their unedited counterparts: increased, neutral, or decreased fitness. In the case of increased fitness, for example in the treatment of SCID-X1, modified hematopoietic progenitor cells selectively expand relative to their unedited counterparts. SCID-X1 is a disease caused by mutations in the IL2RG gene, the function of which is required for proper development of the hematopoietic lymphocyte lineage [Leonard, W. J., et al. Immunological reviews 138, 61-86 (1994); Kaushansky, K. & Williams, W. J. Williams hematology, (McGraw-Hill Medical, New York, 2010)]. In clinical trials with patients who received viral gene therapy for SCID-X1, and a rare example of a spontaneous correction of SCID-X1 mutation, corrected hematopoietic progenitor cells may be able to overcome this developmental block and expand relative to their diseased counterparts to mediate therapy [Bousso, P., et al. Proceedings of the National Academy of Sciences of the United States of America 97, 274-278 (2000); Hacein-Bey-Abina, S., et al. The New England journal of medicine 346, 1185-1193 (2002); Gaspar, H. B., et al. Lancet 364, 2181-2187 (2004)]. In this case, where edited cells possess a selective advantage, even low numbers of edited cells can be amplified through expansion, providing a therapeutic benefit to the patient. In contrast, editing for other hematopoietic diseases, like chronic granulomatous disorder (CGD), would induce no change in fitness for edited hematopoietic progenitor cells, increasing the therapeutic modification threshold. CGD is caused by mutations in genes encoding phagocytic oxidase proteins, which are normally used by neutrophils to generate reactive oxygen species that kill pathogens [Mukherjee, S. & Thrasher, A. J. Gene 525, 174-181 (2013)]. As dysfunction of these genes does not influence hematopoietic progenitor cell fitness or development, but only the ability of a mature hematopoietic cell type to fight infections, there would be likely no preferential expansion of edited cells in this disease. Indeed, no selective advantage for gene corrected cells in CGD has been observed in gene therapy trials, leading to difficulties with long-term cell engraftment [Malech, H. L., et al. Proceedings of the National Academy of Sciences of the United States of America 94, 12133-12138 (1997); Kang, H. J., et al. Molecular therapy. the journal of the American Society of Gene Therapy 19, 2092-2101 (2011)]. As such, significantly higher levels of editing would be required to treat diseases like CGD, where editing creates a neutral fitness advantage, relative to diseases where editing creates increased fitness for target cells. If editing imposes a fitness disadvantage, as would be the case for restoring function to a tumor suppressor gene in cancer cells, modified cells would be outcompeted by their diseased counterparts, causing the benefit of treatment to be low relative to editing rates. This latter class of diseases would be particularly difficult to treat with genome editing therapy.

[1307] In addition to cell fitness, the amount of gene product necessary to treat disease also influences the minimal level of therapeutic genome editing that must be achieved to reverse symptoms. Hemophilia B is one disease where a small change in gene product levels can result in significant changes in clinical outcomes. This disease is caused by mutations in the gene encoding factor IX, a protein normally secreted by the liver into the blood, where it functions as a component of the clotting cascade. Clinical severity of hemophilia B is related to the amount of factor IX activity. Whereas severe disease is associated with less than 1% of normal activity, milder forms of the diseases are associated with greater than 1% of factor IX activity [Kaushansky, K. & Williams, W. J. Williams hematology, (McGraw-Hill Medical, New York, 2010); Lofqvist, T., et al. Journal of internal medicine 241, 395-400 (1997)]. This suggests that editing therapies that can restore factor IX expression to even a small percentage of liver cells could have a large impact on clinical outcomes. A study using ZFNs to correct a mouse model of hemophilia B shortly after birth demonstrated that 3-7% correction was sufficient to reverse disease symptoms, providing preclinical evidence for this hypothesis [Li, H., et al. Nature 475, 217-221 (2011)].

[1308] Disorders where a small change in gene product levels can influence clinical outcomes and diseases where there is a fitness advantage for edited cells, are ideal targets for genome editing therapy, as the therapeutic modification threshold is low enough to permit a high chance of success given the current technology. Targeting these diseases has now resulted in successes with editing therapy at the preclinical level and a phase I clinical trial. Improvements in DSB repair pathway manipulation and nuclease delivery are needed to extend these promising results to diseases with a neutral fitness advantage for edited cells, or where larger amounts of gene product are needed for treatment. The Table 6 below shows some examples of applications of genome editing to therapeutic models, and the references of the below Table 6 and the documents cited in those references are hereby incorporated herein by reference as if set out in full.

TABLE 6

| | Nuclease | | |
|---|---|---|---|
| | Platform | Therapeutic | |
| Disease Type | Employed | Strategy | References |
| Hemophilia B | ZFN | HDR-mediated | Li, H., et al. Nature 475, |
| | | insertion | 217-221 (2011) |
| | | of correct | |
| | | gene sequence | |
| SCID | ZFN | HDR-mediated | Genovese, P., et al. |
| | | insertion | Nature 510, |
| | | of correct | 235-240 (2014) |
| | | gene sequence | |
| Hereditary | CRISPR | HDR-mediated | Yin, H., et al. Nature |
| tyrosinemia | | correction of | Biotechnology 32, |
| | | mutation | 551-553 (2014) |
| | | in liver | |

[1309] Addressing each of the conditions of the foregoing table, using the CRISPR-Cas (eg C2c1) system to target by either HDR-mediated correction of mutation, or HDR-mediated insertion of correct gene sequence, advantageously via a delivery system as herein, e.g., a particle delivery system, is within the ambit of the skilled person from this disclosure and the knowledge in the art. Thus, an embodiment comprehends contacting a Hemophilia B, SCID (e.g., SCID-X1, ADA-SCID) or Hereditary tyrosinemia mutation-carrying HSC with an gRNA-and-Cas (eg C2c1) protein containing particle targeting a genomic locus of interest as to Hemophilia B, SCID (e.g., SCID-X1, ADA-SCID) or Hereditary tyrosinemia (e.g., as in Li, Genovese or Yin). The particle also can contain a suitable HDR template to correct the mutation; or the HSC can be contacted with a second particle or a vector that contains or delivers the HDR template. In this regard, it is mentioned that Hemophilia B is an X-linked recessive disorder caused by loss-of-function mutations in the gene encoding Factor IX, a crucial component of the clotting cascade. Recovering Factor IX activity to above 1% of its levels in severely affected individuals can transform the disease into a significantly milder form, as infusion of recombinant Factor IX into such patients prophylactically from a young age to achieve such levels largely ameliorates clinical complications. With the knowledge in the art and the teachings in this disclosure, the skilled person can correct HSCs as to Hemophilia B using a CRISPR-Cas (eg C2c1) system that targets and corrects the mutation (X-linked recessive disorder caused by loss-of-function mutations in the gene encoding Factor IX) (e.g., with a suitable HDR template that delivers a coding sequence for Factor IX); specifically, the gRNA can target mutation that give rise to Hemophilia B, and the HDR can provide coding for proper expression of Factor IX. An gRNA that targets the mutation-and-Cas (eg C2c1) protein containing particle is contacted with HSCs carrying the mutation. The particle also can contain a suitable HDR template to correct the mutation for proper expression of Factor IX; or the HSC can be contacted with a second particle or a vector that contains or delivers the HDR template. The so contacted cells can be administered; and optionally treated/expanded; cf. Cartier, discussed herein.

[1310] In Cartier, “MINI-SYMPOSIUM: X-Linked Adrenoleukodystrophypa, Hematopoietic Stem Cell Transplantation and Hematopoietic Stem Cell Gene Therapy in X-Linked Adrenoleukodystrophy,” Brain Pathology 20 (2010) 857-862, incorporated herein by reference along with the documents it cites, as if set out in full, there is recognition that allogeneic hematopoietic stem cell transplantation (HSCT) was utilized to deliver normal lysosomal enzyme to the brain of a patient with Hurler's disease, and a discussion of HSC gene therapy to treat ALD. In two patients, peripheral CD34+ cells were collected after granulocyte-colony stimulating factor (G-CSF) mobilization and transduced with an myeloproliferative sarcoma virus enhancer, negative control region deleted, dl587rev primer binding site substituted (MND)-ALD lentiviral vector. CD34+ cells from the patients were transduced with the MND-ALD vector during 16 h in the presence of cytokines at low concentrations. Transduced CD34+ cells were frozen after transduction to perform on 5% of cells various safety tests that included in particular three replication-competent lentivirus (RCL) assays. Transduction efficacy of CD34+ cells ranged from 35% to 50% with a mean number of lentiviral integrated copy between 0.65 and 0.70. After the thawing of transduced CD34+ cells, the patients were reinfused with more than 4.106 transduced CD34+ cells/kg following full myeloablation with busulfan and cyclophos-phamide. The patient's HSCs were ablated to favor engraftment of the gene-corrected HSCs. Hematological recovery occurred between days 13 and 15 for the two patients. Nearly complete immunological recovery occurred at 12 months for the first patient, and at 9 months for the second patient. In contrast to using lentivirus, with the knowledge in the art and the teachings in this disclosure, the skilled person can correct HSCs as to ALD using a CRISPR-Cas (C2c1) system that targets and corrects the mutation (e.g., with a suitable HDR template); specifically, the gRNA can target mutations in ABCD1, a gene located on the X chromosome that codes for ALD, a peroxisomal membrane transporter protein, and the HDR can provide coding for proper expression of the protein. An gRNA that targets the mutation-and-Cas (C2c1) protein containing particle is contacted with HSCs, e.g., CD34+ cells carrying the mutation as in Cartier. The particle also can contain a suitable HDR template to correct the mutation for expression of the peroxisomal membrane transporter protein; or the HSC can be contacted with a second particle or a vector that contains or delivers the HDR template. The so contacted cells optionally can be treated as in Cartier. The so contacted cells can be administered as in Cartier.

[1311] Mention is made of WO 2015/148860, through the teachings herein the invention comprehends methods and materials of these documents applied in conjunction with the teachings herein. In an aspect of blood-related disease gene therapy, methods and compositions for treating beta thalassemia may be adapted to the CRISPR-Cas system of the present invention (see, e.g., WO 2015/148860). In an embodiment, WO 2015/148860 involves the treatment or prevention of beta thalassemia, or its symptoms, e.g., by altering the gene for B-cell CLL/lymphoma 11A (BCL11A). The BCL11A gene is also known as B-cell CLL/lymphoma 11A, BCL11A-L, BCL11A-S, BCL11AXL, CTIP 1, HBFQTL5 and ZNF. BCL11A encodes a zinc-finger protein that is involved in the regulation of globin gene expression. By altering the BCL11A gene (e.g., one or both alleles of the BCL11A gene), the levels of gamma globin can be increased. Gamma globin can replace beta globin in the hemoglobin complex and effectively carry oxygen to tissues, thereby ameliorating beta thalassemia disease phenotypes.

[1312] Mention is also made of WO 2015/148863 and through the teachings herein the invention comprehends methods and materials of these documents which may be adapted to the CRISPR-Cas system of the present invention. In an aspect of treating and preventing sickle cell disease, which is an inherited hematologic disease, WO 2015/148863 comprehends altering the BCL11A gene. By altering the BCL11A gene (e.g., one or both alleles of the BCL11A gene), the levels of gamma globin can be increased. Gamma globin can replace beta globin in the hemoglobin complex and effectively carry oxygen to tissues, thereby ameliorating sickle cell disease phenotypes.

[1313] In an aspect of the invention, methods and compositions which involve editing a target nucleic acid sequence, or modulating expression of a target nucleic acid sequence, and applications thereof in connection with cancer immunotherapy are comprehended by adapting the CRISPR-Cas system of the present invention. Reference is made to the application of gene therapy in WO 2015/161276 which involves methods and compositions which can be used to affect T-cell proliferation, survival and/or function by altering one or more T-cell expressed genes, e.g., one or more of FAS, BID, CTLA4, PDCD1, CBLB, PTPN6, TRAC and/or TRBC genes. In a related aspect, T-cell proliferation can be affected by altering one or more T-cell expressed genes, e.g., the CBLB and/or PTPN6 gene, FAS and/or BID gene, CTLA4 and/or PDCDI and/or TRAC and/or TRBC gene.

[1314] Chimeric antigen receptor (CAR)19 T-cells exhibit anti-leukemic effects in patient malignancies. However, leukemia patients often do not have enough T-cells to collect, meaning that treatment must involve modified T cells from donors. Accordingly, there is interest in establishing a bank of donor T-cells. Qasim et al. (“First Clinical Application of Talen Engineered Universal CAR19 T Cells in B-ALL” ASH 57th Annual Meeting and Exposition, Dec. 5-8, 2015, Abstract 2046 (ash.confex.com/ash/2015/webprogram/Paper81653.html published online November 2015) discusses modifying CAR19 T cells to eliminate the risk of graft-versus-host disease through the disruption of T-cell receptor expression and CD52 targeting. Furthermore, CD52 cells were targeted such that they became insensitive to Alemtuzumab, and thus allowed Alemtuzumab to prevent host-mediated rejection of human leukocyte antigen (HLA) mismatched CAR19 T-cells. Investigators used third generation self-inactivating lentiviral vector encoding a 4g7 CAR19 (CD19 scFv-4-1BB-CD3ζ) linked to RQR8, then electroporated cells with two pairs of TALEN mRNA for multiplex targeting for both the T-cell receptor (TCR) alpha constant chain locus and the CD52 gene locus. Cells which were still expressing TCR following ex vivo expansion were depleted using CliniMacs a/P TCR depletion, yielding a T-cell product (UCART19) with <1% TCR expression, 85% of which expressed CAR19, and 64% becoming CD52 negative. The modified CAR19 T cells were administered to treat a patient's relapsed acute lymphoblastic leukemia. The teachings provided herein provide effective methods for providing modified hematopoietic stem cells and progeny thereof, including but not limited to cells of the myeloid and lymphoid lineages of blood, including T cells, B cells, monocytes, macrophages, neutrophils, basophils, eosinophils, erythrocytes, dendritic cells, and megakaryocytes or platelets, and natural killer cells and their precursors and progenitors. Such cells can be modified by knocking out, knocking in, or otherwise modulating targets, for example to remove or modulate CD52 as described above, and other targets, such as, without limitation, CXCR4, and PD-1. Thus compositions, cells, and method of the invention can be used to modulate immune responses and to treat, without limitation, malignancies, viral infections, and immune disorders, in conjunction with modification of administration of T cells or other cells to patients.

[1315] Mention is made of WO 2015/148670 and through the teachings herein the invention comprehends methods and materials of this document applied in conjunction with the teachings herein. In an aspect of gene therapy, methods and compositions for editing of a target sequence related to or in connection with Human Immunodeficiency Virus (HIV) and Acquired Immunodeficiency Syndrome (AIDS) are comprehended. In a related aspect, the invention described herein comprehends prevention and treatment of HIV infection and AIDS, by introducing one or more mutations in the gene for C-C chemokine receptor type 5 (CCR5). The CCR5 gene is also known as CKR5, CCR-5, CD195, CKR-5, CCCKR5, CMKBR5, IDDM22, and CC-CKR-5. In a further aspect, the invention described herein comprehends provide for prevention or reduction of HIV infection and/or prevention or reduction of the ability for HIV to enter host cells, e.g., in subjects who are already infected. Exemplary host cells for HIV include, but are not limited to, CD4 cells, T cells, gut associated lymphatic tissue (GALT), macrophages, dendritic cells, myeloid precursor cell, and microglia. Viral entry into the host cells requires interaction of the viral glycoproteins gp41 and gp120 with both the CD4 receptor and a co-receptor, e.g., CCR5. If a co-receptor, e.g., CCR5, is not present on the surface of the host cells, the virus cannot bind and enter the host cells. The progress of the disease is thus impeded. By knocking out or knocking down CCR5 in the host cells, e.g., by introducing a protective mutation (such as a CCR5 delta 32 mutation), entry of the HIV virus into the host cells is prevented.

[1316] X-linked Chronic granulomatous disease (CGD) is a hereditary disorder of host defense due to absent or decreased activity of phagocyte NADPH oxidase. Using a CRISPR-Cas (C2c1) system that targets and corrects the mutation (absent or decreased activity of phagocyte NADPH oxidase) (e.g., with a suitable HDR template that delivers a coding sequence for phagocyte NADPH oxidase); specifically, the gRNA can target mutation that gives rise to CGD (deficient phagocyte NADPH oxidase), and the HDR can provide coding for proper expression of phagocyte NADPH oxidase. An gRNA that targets the mutation-and-Cas (C2c1) protein containing particle is contacted with HSCs carrying the mutation. The particle also can contain a suitable HDR template to correct the mutation for proper expression of phagocyte NADPH oxidase; or the HSC can be contacted with a second particle or a vector that contains or delivers the HDR template. The so contacted cells can be administered; and optionally treated/expanded; cf. Cartier.

[1317] Fanconi anemia: Mutations in at least 15 genes (FANCA, FANCB, FANCC, FANCD1/BRCA2, FANCD2, FANCE, FANCF, FANCG, FANCI, FANCJ/BACH1/BRIP1, FANCL/PHF9/POG, FANCM, FANCN/PALB2, FANCO/Rad51C, and FANCP/SLX4/BTBD12) can cause Fanconi anemia. Proteins produced from these genes are involved in a cell process known as the FA pathway. The FA pathway is turned on (activated) when the process of making new copies of DNA, called DNA replication, is blocked due to DNA damage. The FA pathway sends certain proteins to the area of damage, which trigger DNA repair so DNA replication can continue. The FA pathway is particularly responsive to a certain type of DNA damage known as interstrand cross-links (ICLs). ICLs occur when two DNA building blocks (nucleotides) on opposite strands of DNA are abnormally attached or linked together, which stops the process of DNA replication. ICLs can be caused by a buildup of toxic substances produced in the body or by treatment with certain cancer therapy drugs. Eight proteins associated with Fanconi anemia group together to form a complex known as the FA core complex. The FA core complex activates two proteins, called FANCD2 and FANCI. The activation of these two proteins brings DNA repair proteins to the area of the ICL so the cross-link can be removed and DNA replication can continue. the FA core complex. More in particular, the FA core complex is a nuclear multiprotein complex consisting of FANCA, FANCB, FANCC, FANCE, FANCF, FANCG, FANCL, and FANCM, functions as an E3 ubiquitin ligase and mediates the activation of the ID complex, which is a heterodimer composed of FANCD2 and FANCI. Once monoubiquitinated, it interacts with classical tumor suppressors downstream of the FA pathway including FANCD1/BRCA2, FANCN/PALB2, FANCJ/BRIP1, and FANCO/Rad51C and thereby contributes to DNA repair via homologous recombination (HR). Eighty to 90 percent of FA cases are due to mutations in one of three genes, FANCA, FANCC, and FANCG. These genes provide instructions for producing components of the FA core complex. Mutations in such genes associated with the FA core complex will cause the complex to be nonfunctional and disrupt the entire FA pathway. As a result, DNA damage is not repaired efficiently and ICLs build up over time. Geiselhart, “Review Article, Disrupted Signaling through the Fanconi Anemia Pathway Leads to Dysfunctional Hematopoietic Stem Cell Biology: Underlying Mechanisms and Potential Therapeutic Strategies,” Anemia Volume 2012 (2012), Article ID 265790, dx.doi.org/10.1155/2012/265790 discussed FA and an animal experiment involving intrafemoral injection of a lentivirus encoding the FANCC gene resulting in correction of HSCs in vivo. Using a CRISPR-Cas (C2c1) system that targets and one or more of the mutations associated with FA, for instance a CRISPR-Cas (C2c1) system having gRNA(s) and HDR template(s) that respectively targets one or more of the mutations of FANCA, FANCC, or FANCG that give rise to FA and provide corrective expression of one or more of FANCA, FANCC or FANCG; e.g., the gRNA can target a mutation as to FANCC, and the HDR can provide coding for proper expression of FANCC. An gRNA that targets the mutation(s) (e.g., one or more involved in FA, such as mutation(s) as to any one or more of FANCA, FANCC or FANCG)-and-Cas (C2c1) protein containing particle is contacted with HSCs carrying the mutation(s). The particle also can contain a suitable HDR template(s) to correct the mutation for proper expression of one or more of the proteins involved in FA, such as any one or more of FANCA, FANCC or FANCG; or the HSC can be contacted with a second particle or a vector that contains or delivers the HDR template. The so contacted cells can be administered; and optionally treated/expanded; cf. Cartier.

[1318] The particle in the herein discussion (e.g., as to containing gRNA(s) and Cas (C2c1), optionally HDR template(s), or HDR template(s); for instance as to Hemophilia B, SCID, SCID-X1, ADA-SCID, Hereditary tyrosinemia, β-thalassemia, X-linked CGD, Wiskott-Aldrich syndrome, Fanconi anemia, adrenoleukodystrophy (ALD), metachromatic leukodystrophy (MLD), HIV/AIDS, Immunodeficiency disorder, Hematologic condition, or genetic lysosomal storage disease) is advantageously obtained or obtainable from admixing an gRNA(s) and Cas (C2c1) protein mixture (optionally containing HDR template(s) or such mixture only containing HDR template(s) when separate particles as to template(s) is desired) with a mixture comprising or consisting essentially of or consisting of surfactant, phospholipid, biodegradable polymer, lipoprotein and alcohol (wherein one or more gRNA targets the genetic locus or loci in the HSC).

[1319] Indeed, the invention is especially suited for treating hematopoietic genetic disorders with genome editing, and immunodeficiency disorders, such as genetic immunodeficiency disorders, especially through using the particle technology herein-discussed. Genetic immunodeficiencies are diseases where genome editing interventions of the instant invention can successful. The reasons include: Hematopoietic cells, of which immune cells are a subset, are therapeutically accessible. They can be removed from the body and transplanted autologously or allogenically. Further, certain genetic immunodeficiencies, e.g., severe combined immunodeficiency (SCID), create a proliferative disadvantage for immune cells. Correction of genetic lesions causing SCID by rare, spontaneous ‘reverse’ mutations indicates that correcting even one lymphocyte progenitor may be sufficient to recover immune function in patients . . . / . . . / . . . /Users/t_kowalski/AppData/Local/Microsoft/Windows/Temporary Internet Files/Content.Outlook/GA8VY8LK/Treating SCID for Ellen.docx—_ENREF_1 See Bousso, P., et al. Diversity, functionality, and stability of the T cell repertoire derived in vivo from a single human T cell precursor. Proceedings of the National Academy of Sciences of the United States of America 97, 274-278 (2000). The selective advantage for edited cells allows for even low levels of editing to result in a therapeutic effect. This effect of the instant invention can be seen in SCID, Wiskott-Aldrich Syndrome, and the other conditions mentioned herein, including other genetic hematopoietic disorders such as alpha- and beta-thalassemia, where hemoglobin deficiencies negatively affect the fitness of erythroid progenitors.

[1320] The activity of NHEJ and HDR DSB repair varies significantly by cell type and cell state. NHEJ is not highly regulated by the cell cycle and is efficient across cell types, allowing for high levels of gene disruption in accessible target cell populations. In contrast, HDR acts primarily during S/G2 phase, and is therefore restricted to cells that are actively dividing, limiting treatments that require precise genome modifications to mitotic cells [Ciccia, A. & Elledge, S. J. Molecular cell 40, 179-204 (2010); Chapman, J. R., et al. Molecular cell 47, 497-510 (2012)]. Notably, the CRISPR-C2c1 system comprising a C2c1 protein generates staggering cuts at the target site. Therefore, cleavage, modification and/or repair of target sequences in this invention may be HDR dependent or independent. In particular embodiments, the CRISPR-C2c1 system introduces staggered DSB repair via NHEJ. In certain particular embodiments, the CRISPR-C2c1 system in this invention introduces staggered DSB repair via NHEJ in non-dividing cells such as neurons.

[1321] The efficiency of correction via HDR may be controlled by the epigenetic state or sequence of the targeted locus, or the specific repair template configuration (single vs. double stranded, long vs. short homology arms) used [Hacein-Bey-Abina, S., et al. The New England journal of medicine 346, 1185-1193 (2002); Gaspar, H. B., et al. Lancet 364, 2181-2187 (2004); Beumer, K. J., et al. G3 (2013)]. The relative activity of NHEJ and HDR machineries in target cells may also affect gene correction efficiency, as these pathways may compete to resolve DSBs [Beumer, K. J., et al. Proceedings of the National Academy of Sciences of the United States of America 105, 19821-19826 (2008)]. HDR also imposes a delivery challenge not seen with NHEJ strategies, as it requires the concurrent delivery of nucleases and repair templates. In practice, these constraints have so far led to low levels of HDR in therapeutically relevant cell types. Clinical translation has therefore largely focused on NHEJ strategies to treat disease, although proof-of-concept preclinical HDR treatments have now been described for mouse models of hemophilia B and hereditary tyrosinemia [Li, H., et al. Nature 475, 217-221 (2011); Yin, H., et al. Nature biotechnology 32, 551-553 (2014)].

[1322] Any given genome editing application may comprise combinations of proteins, small RNA molecules, and/or repair templates, making delivery of these multiple parts substantially more challenging than small molecule therapeutics. Two main strategies for delivery of genome editing tools have been developed: ex vivo and in vivo. In ex vivo treatments, diseased cells are removed from the body, edited and then transplanted back into the patient. Ex vivo editing has the advantage of allowing the target cell population to be well defined and the specific dosage of therapeutic molecules delivered to cells to be specified. The latter consideration may be particularly important when off-target modifications are a concern, as titrating the amount of nuclease may decrease such mutations (Hsu et al., 2013). Another advantage of ex vivo approaches is the typically high editing rates that can be achieved, due to the development of efficient delivery systems for proteins and nucleic acids into cells in culture for research and gene therapy applications.

[1323] There may be drawbacks with ex vivo approaches that limit application to a small number of diseases. For instance, target cells must be capable of surviving manipulation outside the body. For many tissues, like the brain, culturing cells outside the body is a major challenge, because cells either fail to survive, or lose properties necessary for their function in vivo. Thus, in view of this disclosure and the knowledge in the art, ex vivo therapy as to tissues with adult stem cell populations amenable to ex vivo culture and manipulation, such as the hematopoietic system, by the CRISPR-Cas (C2c1) system are enabled. [Bunn, H.F. & Aster, J. Pathophysiology of blood disorders, (McGraw-Hill, New York, 2011)]

[1324] In vivo genome editing involves direct delivery of editing systems to cell types in their native tissues. In vivo editing allows diseases in which the affected cell population is not amenable to ex vivo manipulation to be treated. Furthermore, delivering nucleases to cells in situ allows for the treatment of multiple tissue and cell types. These properties probably allow in vivo treatment to be applied to a wider range of diseases than ex vivo therapies.

[1325] To date, in vivo editing has largely been achieved through the use of viral vectors with defined, tissue-specific tropism. Such vectors are currently limited in terms of cargo carrying capacity and tropism, restricting this mode of therapy to organ systems where transduction with clinically useful vectors is efficient, such as the liver, muscle and eye [Kotterman, M.A. & Schaffer, D. V. Nature reviews. Genetics 15, 445-451 (2014); Nguyen, T. H. & Ferry, N. Gene therapy 11 Suppl 1, S76-84 (2004); Boye, S. E., et al. Molecular therapy: the journal of the American Society of Gene Therapy 21, 509-519 (2013)].

[1326] A potential barrier for in vivo delivery is the immune response that may be created in response to the large amounts of virus necessary for treatment, but this phenomenon is not unique to genome editing and is observed with other virus based gene therapies [Bessis, N., et al. Gene therapy 11 Suppl 1, S10-17 (2004)]. It is also possible that peptides from editing nucleases themselves are presented on MHC Class I molecules to stimulate an immune response, although there is little evidence to support this happening at the preclinical level. Another major difficulty with this mode of therapy is controlling the distribution and consequently the dosage of genome editing nucleases in vivo, leading to off-target mutation profiles that may be difficult to predict. However, in view of this disclosure and the knowledge in the art, including the use of virus- and particle-based therapies being used in the treatment of cancers, in vivo modification of HSCs, for instance by delivery by either particle or virus, is within the ambit of the skilled person.

[1327] Ex Vivo Editing Therapy: The long standing clinical expertise with the purification, culture and transplantation of hematopoietic cells has made diseases affecting the blood system such as SCID, Fanconi anemia, Wiskott-Aldrich syndrome and sickle cell anemia the focus of ex vivo editing therapy. Another reason to focus on hematopoietic cells is that, thanks to previous efforts to design gene therapy for blood disorders, delivery systems of relatively high efficiency already exist. With these advantages, this mode of therapy can be applied to diseases where edited cells possess a fitness advantage, so that a small number of engrafted, edited cells can expand and treat disease. One such disease is HIV, where infection results in a fitness disadvantage to CD4+ T cells.

[1328] Ex vivo editing therapy has been recently extended to include gene correction strategies. The barriers to HDR ex vivo were overcome in a recent paper from Genovese and colleagues, who achieved gene correction of a mutated IL2RG gene in hematopoietic stem cells (HSCs) obtained from a patient suffering from SCID-X1 [Genovese, P., et al. Nature 510, 235-240 (2014)]. Genovese et. al. accomplished gene correction in HSCs using a multimodal strategy. First, HSCs were transduced using integration-deficient lentivirus containing an HDR template encoding a therapeutic cDNA for IL2RG. Following transduction, cells were electroporated with mRNA encoding ZFNs targeting a mutational hotspot in IL2RG to stimulate HDR based gene correction. To increase HDR rates, culture conditions were optimized with small molecules to encourage HSC division. With optimized culture conditions, nucleases and HDR templates, gene corrected HSCs from the SCID-X1 patient were obtained in culture at therapeutically relevant rates. HSCs from unaffected individuals that underwent the same gene correction procedure could sustain long-term hematopoiesis in mice, the gold standard for HSC function. HSCs are capable of giving rise to all hematopoietic cell types and can be autologously transplanted, making them an extremely valuable cell population for all hematopoietic genetic disorders [Weissman, I. L. & Shizuru, J. A. Blood 112, 3543-3553 (2008)]. Gene corrected HSCs could, in principle, be used to treat a wide range of genetic blood disorders making this study an exciting breakthrough for therapeutic genome editing.

[1329] In Vivo Editing Therapy: In vivo editing can be used advantageously from this disclosure and the knowledge in the art. For organ systems where delivery is efficient, there have already been a number of exciting preclinical therapeutic successes. The first example of successful in vivo editing therapy was demonstrated in a mouse model of haemophilia B [Li, H., et al. Nature 475, 217-221 (2011)]. As noted earlier, Haemophilia B is an X-linked recessive disorder caused by loss-of-function mutations in the gene encoding Factor IX, a crucial component of the clotting cascade. Recovering Factor IX activity to above 1% of its levels in severely affected individuals can transform the disease into a significantly milder form, as infusion of recombinant Factor IX into such patients prophylactically from a young age to achieve such levels largely ameliorates clinical complications [Lofqvist, T., et al. Journal of internal medicine 241, 395-400 (1997)]. Thus, only low levels of HDR gene correction are necessary to change clinical outcomes for patients. In addition, Factor IX is synthesized and secreted by the liver, an organ that can be transduced efficiently by viral vectors encoding editing systems.

[1330] Using hepatotropic adeno-associated viral (AAV) serotypes encoding ZFNs and a corrective HDR template, up to 7% gene correction of a mutated, humanized Factor IX gene in the murine liver was achieved [Li, H., et al. Nature 475, 217-221 (2011)]. This resulted in improvement of clot formation kinetics, a measure of the function of the clotting cascade, demonstrating for the first time that in vivo editing therapy is not only feasible, but also efficacious. As discussed herein, the skilled person is positioned from the teachings herein and the knowledge in the art, e.g., Li to address Haemophilia B with a particle-containing HDR template and a CRISPR-Cas (C2c1) system that targets the mutation of the X-linked recessive disorder to reverse the loss-of-function mutation.

[1331] Building on this study, other groups have recently used in vivo genome editing of the liver with CRISPR-Cas to successfully treat a mouse model of hereditary tyrosinemia and to create mutations that provide protection against cardiovascular disease. These two distinct applications demonstrate the versatility of this approach for disorders that involve hepatic dysfunction [Yin, H., et al. Nature biotechnology 32, 551-553 (2014); Ding, Q., et al. Circulation research 115, 488-492 (2014)]. Application of in vivo editing to other organ systems are necessary to prove that this strategy is widely applicable. Currently, efforts to optimize both viral and non-viral vectors are underway to expand the range of disorders that can be treated with this mode of therapy [Kotterman, M. A. & Schaffer, D. V. Nature reviews. Genetics 15, 445-451 (2014); Yin, H., et al. Nature reviews. Genetics 15, 541-555 (2014)]. As discussed herein, the skilled person is positioned from the teachings herein and the knowledge in the art, e.g., Yin to address hereditary tyrosinemia with a particle-containing HDR template and a CRISPR-Cas (C2c1) system that targets the mutation.

[1332] Targeted deletion, therapeutic applications: Targeted deletion of genes may be preferred. Preferred are, therefore, genes involved in immunodeficiency disorder, hematologic condition, or genetic lysosomal storage disease, e.g., Hemophilia B, SCID, SCID-X1, ADA-SCID, Hereditary tyrosinemia, β-thalassemia, X-linked CGD, Wiskott-Aldrich syndrome, Fanconi anemia, adrenoleukodystrophy (ALD), metachromatic leukodystrophy (MLD), HIV/AIDS, other metabolic disorders, genes encoding mis-folded proteins involved in diseases, genes leading to loss-of-function involved in diseases; generally, mutations that can be targeted in an HSC, using any herein-discussed delivery system, with the particle system considered advantageous.

[1333] In the present invention, the immunogenicity of the CRISPR enzyme in particular may be reduced following the approach first set out in Tangri et al with respect to erythropoietin and subsequently developed. Accordingly, directed evolution or rational design may be used to reduce the immunogenicity of the CRISPR enzyme (for instance a C2c1) in the host species (human or other species).

[1334] Genome editing: The CRISPR/Cas (C2c1) systems of the present invention can be used to correct genetic mutations that were previously attempted with limited success using TALEN and ZFN and lentiviruses, including as herein discussed; see also WO2013163628. With respect to the C2c1 protein, the CRISPR-C2c1 system may recognize a PAM sequence that is a T-rich sequence. In some embodiments, the PAM sequence is 5′ TTN 3′ or 5′ ATTN 3′, wherein N is any nucleotide. In some embodiments, the CRISPR-C2c1 system introduces one or more staggered double strand breaks (DSBs) with a 5′ overhang to the target gene. In particular embodiments, the 5′ overhang is 7 nt. In some embodiments, the CRISPR-C2c1 system introduces a template DNA sequence at the staggered DSB via HR or NHEJ. In some particular embodiments, the CRISPR-C2c1 system comprises a catalytically inactivated C2c1 protein associated with a functional domain that modifies the target gene. In a particular embodiment, the CRISPR-C2c1 system introduces a single mutation. In another particular embodiment, the CRISPR-C2c1 system introduces a single nucleotide modification to the transcript of the target gene.

### Treating Disease of the Brain, Central Nervous and Immune Systems

[1335] The present invention also contemplates delivering the CRISPR-Cas system to the brain or neurons. In some embodiments, the CRISPR-Cas system comprises a C2c1 protein. In some embodiments, the CRISPR-C2c1 system may recognize a PAM sequence that is a T-rich sequence. In some embodiments, the PAM sequence is 5′ TTN 3′ or 5′ ATTN 3′, wherein N is any nucleotide. In some embodiments, the CRISPR-C2c1 system introduces one or more staggered double strand breaks (DSBs) with a 5′ overhang to the target gene. In particular embodiments, the 5′ overhang is 7 nt. In preferred embodiments, the CRISPR-C2c1 system introduces a template DNA sequence at the staggered DSB via HR or NHEJ, preferably NHEJ. In some particular embodiments, the CRISPR-C2c1 system comprises a catalytically inactivated C2c1 protein associated with a functional domain that modifies the target gene. In a particular embodiment, the CRISPR-C2c1 system introduces a single mutation. In another particular embodiment, the CRISPR-C2c1 system introduces a single nucleotide modification to the transcript of the target gene. For example, RNA interference (RNAi) offers therapeutic potential for this disorder by reducing the expression of HTT, the disease-causing gene of Huntington's disease (see, e.g., McBride et al., Molecular Therapy vol. 19 no. 12 Dec. 2011, pp. 2152-2162), therefore Applicant postulates that it may be used/and or adapted to the CRISPR-Cas system. The CRISPR-Cas system may be generated using an algorithm to reduce the off-targeting potential of antisense sequences. The CRISPR-Cas sequences may target either a sequence in exon 52 of mouse, rhesus or human huntingtin and expressed in a viral vector, such as AAV. Animals, including humans, may be injected with about three microinjections per hemisphere (six injections total): the first 1 mm rostral to the anterior commissure (12 l) and the two remaining injections (12 μl and 10 μl, respectively) spaced 3 and 6 mm caudal to the first injection with 1e12 vg/ml of AAV at a rate of about 1/minute, and the needle was left in place for an additional 5 minutes to allow the injectate to diffuse from the needle tip.

[1336] DiFiglia et al. (PNAS, Oct. 23, 2007, vol. 104, no. 43, 17204-17209) observed that single administration into the adult striatum of an siRNA targeting Htt can silence mutant Htt, attenuate neuronal pathology, and delay the abnormal behavioral phenotype observed in a rapid-onset, viral transgenic mouse model of HD. DiFiglia injected mice intrastriatally with 2 1 of Cy3-labeled cc-siRNA-Htt or unconjugated siRNA-Htt at 10 M. A similar dosage of CRISPR Cas targeted to Htt may be contemplated for humans in the present invention, for example, about 5-10 ml of 10 M CRISPR Cas targeted to Htt may be injected intrastriatally.

[1337] In another example, Boudreau et al. (Molecular Therapy vol. 17 no. 6 Jun. 2009) injects 5 of recombinant AAV serotype 2/1 vectors expressing htt-specific RNAi virus (at 4×1012 viral genomes/ml) into the striatum. A similar dosage of CRISPR Cas targeted to Htt may be contemplated for humans in the present invention, for example, about 10-20 ml of 4×1012 viral genomes/ml) CRISPR Cas targeted to Htt may be injected intrastriatally.

[1338] In another example, a CRISPR Cas targeted to HTT may be administered continuously (see, e.g., Yu et al., Cell 150, 895-908, Aug. 31, 2012). Yu et al. utilizes osmotic pumps delivering 0.25 ml/hr (Model 2004) to deliver 300 mg/day of ss-siRNA or phosphate-buffered saline (PBS) (Sigma Aldrich) for 28 days, and pumps designed to deliver 0.5 l/hr (Model 2002) were used to deliver 75 mg/day of the positive control MOE ASO for 14 days. Pumps (Durect Corporation) were filled with ss-siRNA or MOE diluted in sterile PBS and then incubated at 37 C for 24 or 48 (Model 2004) hours prior to implantation. Mice were anesthetized with 2.5% isoflurane, and a midline incision was made at the base of the skull. Using stereotaxic guides, a cannula was implanted into the right lateral ventricle and secured with Loctite adhesive. A catheter attached to an Alzet osmotic mini pump was attached to the cannula, and the pump was placed subcutaneously in the midscapular area. The incision was closed with 5.0 nylon sutures. A similar dosage of CRISPR Cas targeted to Htt may be contemplated for humans in the present invention, for example, about 500 to 1000 g/day CRISPR Cas targeted to Htt may be administered.

[1339] In another example of continuous infusion, Stiles et al. (Experimental Neurology 233 (2012) 463-471) implanted an intraparenchymal catheter with a titanium needle tip into the right putamen. The catheter was connected to a SynchroMed® II Pump (Medtronic Neurological, Minneapolis, Minn.) subcutaneously implanted in the abdomen. After a 7 day infusion of phosphate buffered saline at 6 L/day, pumps were re-filled with test article and programmed for continuous delivery for 7 days. About 2.3 to 11.52 mg/d of siRNA were infused at varying infusion rates of about 0.1 to 0.5 μL/min. A similar dosage of CRISPR Cas targeted to Htt may be contemplated for humans in the present invention, for example, about 20 to 200 mg/day CRISPR Cas targeted to Htt may be administered. In another example, the methods of US Patent Publication No. 20130253040 assigned to Sangamo may also be also be adapted from TALES to the nucleic acid-targeting system of the present invention for treating Huntington's Disease.

[1340] In another example, the methods of US Patent Publication No. 20130253040 (WO2013130824) assigned to Sangamo may also be also be adapted from TALES to the CRISPR Cas system of the present invention for treating Huntington's Disease.

[1341] WO2015089354 A1 in the name of The Broad Institute et al., hereby incorporated by reference, describes a targets for Huntington's Disease (HP). Possible target genes of CRISPR complex in regard to Huntington's Disease: PRKCE; IGF1; EP300; RCOR1; PRKCZ; HDAC4; and TGM2. Accordingly, one or more of PRKCE; IGF1; EP300; RCOR1; PRKCZ; HDAC4; and TGM2 may be selected as targets for Huntington's Disease in some embodiments of the present invention.

[1342] Other trinucleotide repeat disorders. These may include any of the following: Category I includes Huntington's disease (HD) and the spinocerebellar ataxias; Category II expansions are phenotypically diverse with heterogeneous expansions that are generally small in magnitude, but also found in the exons of genes; and Category III includes fragile X syndrome, myotonic dystrophy, two of the spinocerebellar ataxias, juvenile myoclonic epilepsy, and Friedreich's ataxia.

[1343] A further aspect of the invention relates to utilizing the CRISPR-Cas system for correcting defects in the EMP2A and EMP2B genes that have been identified to be associated with Lafora disease. Lafora disease is an autosomal recessive condition which is characterized by progressive myoclonus epilepsy which may start as epileptic seizures in adolescence. A few cases of the disease may be caused by mutations in genes yet to be identified. The disease causes seizures, muscle spasms, difficulty walking, dementia, and eventually death. There is currently no therapy that has proven effective against disease progression. Other genetic abnormalities associated with epilepsy may also be targeted by the CRISPR-Cas system and the underlying genetics is further described in Genetics of Epilepsy and Genetic Epilepsies, edited by Giuliano Avanzini, Jeffrey L. Noebels, Mariani Foundation Paediatric Neurology: 20; 2009).

[1344] The methods of US Patent Publication No. 20110158957 assigned to Sangamo BioSciences, Inc. involved in inactivating T cell receptor (TCR) genes may also be modified to the CRISPR Cas system of the present invention. In another example, the methods of US Patent Publication No. 20100311124 assigned to Sangamo BioSciences, Inc. and US Patent Publication No. 20110225664 assigned to Cellectis, which are both involved in inactivating glutamine synthetase gene expression genes may also be modified to the CRISPR Cas system of the present invention.

[1345] Delivery options for the brain include encapsulation of CRISPR enzyme and guide RNA in the form of either DNA or RNA into liposomes and conjugating to molecular Trojan horses for trans-blood brain barrier (BBB) delivery. Molecular Trojan horses have been shown to be effective for delivery of B-gal expression vectors into the brain of non-human primates. The same approach can be used to delivery vectors containing CRISPR enzyme and guide RNA. For instance, Xia C F and Boado R J, Pardridge W M (“Antibody-mediated targeting of siRNA via the human insulin receptor using avidin-biotin technology.” Mol Pharm. 2009 May-June; 6(3):747-51. doi: 10.1021/mp800194) describes how delivery of short interfering RNA (siRNA) to cells in culture, and in vivo, is possible with combined use of a receptor-specific monoclonal antibody (mAb) and avidin-biotin technology. The authors also report that because the bond between the targeting mAb and the siRNA is stable with avidin-biotin technology, and RNAi effects at distant sites such as brain are observed in vivo following an intravenous administration of the targeted siRNA.

[1346] Zhang et al. (Mol Ther. 2003 January; 7(1):11-8.)) describe how expression plasmids encoding reporters such as luciferase were encapsulated in the interior of an “artificial virus” comprised of an 85 nm pegylated immunoliposome, which was targeted to the rhesus monkey brain in vivo with a monoclonal antibody (MAb) to the human insulin receptor (HIR). The HIRMAb enables the liposome carrying the exogenous gene to undergo transcytosis across the blood-brain barrier and endocytosis across the neuronal plasma membrane following intravenous injection. The level of luciferase gene expression in the brain was 50-fold higher in the rhesus monkey as compared to the rat. Widespread neuronal expression of the beta-galactosidase gene in primate brain was demonstrated by both histochemistry and confocal microscopy. The authors indicate that this approach makes feasible reversible adult transgenics in 24 hours. Accordingly, the use of immunoliposome is preferred. These may be used in conjunction with antibodies to target specific tissues or cell surface proteins.

### Alzheimer's Disease

[1347] US Patent Publication No. 20110023153, describes use of zinc finger nucleases to genetically modify cells, animals and proteins associated with Alzheimer's Disease. Once modified cells and animals may be further tested using known methods to study the effects of the targeted mutations on the development and/or progression of AD using measures commonly used in the study of AD—such as, without limitation, learning and memory, anxiety, depression, addiction, and sensory motor functions as well as assays that measure behavioral, functional, pathological, metabolic and biochemical function.

[1348] The present disclosure comprises editing of any chromosomal sequences that encode proteins associated with AD.

[1349] In some embodiments, the system disclosed in this invention comprises a C2c1-CRISPR system. In some embodiments, the CRISPR-C2c1 system may recognize a PAM sequence that is a T-rich sequence. In some embodiments, the PAM sequence is 5′ TTN 3′ or 5′ ATTN 3′, wherein N is any nucleotide. In some embodiments, the CRISPR-C2c1 system introduces one or more staggered double strand breaks (DSBs) with a 5′ overhang to the target gene. In particular embodiments, the 5′ overhang is 7 nt. In some embodiments, the CRISPR-C2c1 system introduces a template DNA sequence at the staggered DSB via HR or NHEJ. In some particular embodiments, the CRISPR-C2c1 system comprises a catalytically inactivated C2c1 protein associated with a functional domain that modifies the target gene. In a particular embodiment, the CRISPR-C2c1 system introduces a single mutation to AD related genes. In another particular embodiment, the CRISPR-C2c1 system introduces a single nucleotide modification to the transcript of AD related genes. The AD-related proteins are typically selected based on an experimental association of the AD-related protein to an AD disorder. For example, the production rate or circulating concentration of an AD-related protein may be elevated or depressed in a population having an AD disorder relative to a population lacking the AD disorder. Differences in protein levels may be assessed using proteomic techniques including but not limited to Western blot, immunohistochemical staining, enzyme linked immunosorbent assay (ELISA), and mass spectrometry. Alternatively, the AD-related proteins may be identified by obtaining gene expression profiles of the genes encoding the proteins using genomic techniques including but not limited to DNA microarray analysis, serial analysis of gene expression (SAGE), and quantitative real-time polymerase chain reaction (Q-PCR).

[1350] Examples of Alzheimer's disease associated proteins may include the very low density lipoprotein receptor protein (VLDLR) encoded by the VLDLR gene, the ubiquitin-like modifier activating enzyme 1 (UBA1) encoded by the UBA1 gene, or the NEDD8-activating enzyme El catalytic subunit protein (UBE1C) encoded by the UBA3 gene, for example.

[1351] By way of non-limiting example, proteins associated with AD include but are not limited to the proteins listed as follows: Chromosomal Sequence Encoded Protein ALAS2 Delta-aminolevulinate synthase 2 (ALAS2) ABCA1 ATP-binding cassette transporter (ABCA1) ACE Angiotensin I-converting enzyme (ACE) APOE Apolipoprotein E precursor (APOE) APP amyloid precursor protein (APP) AQP1 aquaporin 1 protein (AQP1) BIN1 Myc box-dependent-interacting protein 1 or bridging integrator 1 protein (BIN1) BDNF brain-derived neurotrophic factor (BDNF) BTNL8 Butyrophilin-like protein 8 (BTNL8) C10RF49 chromosome 1 open reading frame 49 CDH4 Cadherin-4 CHRNB2 Neuronal acetylcholine receptor subunit beta-2 CKLFSF2 CKLF-like MARVEL transmembrane domain-containing protein 2 (CKLFSF2) CLEC4E C-type lectin domain family 4, member e (CLEC4E) CLU clusterin protein (also known as apoplipoprotein J) CR1 Erythrocyte complement receptor 1 (CR1, also known as CD35, C3b/C4b receptor and immune adherence receptor) CR1L Erythrocyte complement receptor 1 (CR1L) CSF3R granulocyte colony-stimulating factor 3 receptor (CSF3R) CST3 Cystatin C or cystatin 3 CYP2C Cytochrome P450 2C DAPK1 Death-associated protein kinase 1 (DAPK1) ESR1 Estrogen receptor 1 FCAR Fc fragment of IgA receptor (FCAR, also known as CD89) FCGR3B Fc fragment of IgG, low affinity IIIb, receptor (FCGR3B or CD16b) FFA2 Free fatty acid receptor 2 (FFA2) FGA Fibrinogen (Factor I) GAB2 GRB2-associated-binding protein 2 (GAB2) GAB2 GRB2-associated-binding protein 2 (GAB2) GALP Galanin-like peptide GAPDHS Glyceraldehyde-3-phosphate dehydrogenase, spermatogenic (GAPDHS) GMPB GMBP HP Haptoglobin (HP) HTR7 5-hydroxytryptamine (serotonin) receptor 7 (adenylate cyclase-coupled) IDE Insulin degrading enzyme IF127 IF127 IFI6 Interferon, alpha-inducible protein 6 (IFI6) IFIT2 Interferon-induced protein with tetratricopeptide repeats 2 (IFIT2) IL1RN interleukin-1 receptor antagonist (IL-iRA) IL8RA Interleukin 8 receptor, alpha (IL8RA or CD181) IL8RB Interleukin 8 receptor, beta (IL8RB) JAG1 Jagged 1 (JAG1) KCNJ15 Potassium inwardly-rectifying channel, subfamily J, member 15 (KCNJ15) LRP6 Low-density lipoprotein receptor-related protein 6 (LRP6) MAPT microtubule-associated protein tau (MAPT) MARK4 MAP/microtubule affinity-regulating kinase 4 (MARK4) MPHOSPHI M-phase phosphoprotein 1 MTHFR 5,10-methylenetetrahydrofolate reductase MX2 Interferon-induced GTP-binding protein Mx2 NBN Nibrin, also known as NBN NCSTN Nicastrin NIACR2 Niacin receptor 2 (NIACR2, also known as GPR109B) NMNAT3 nicotinamide nucleotide adenylyltransferase 3 NTM Neurotrimin (or HNT) ORM1 Orosmucoid 1 (ORM1) or Alpha-1-acid glycoprotein 1 P2RY13 P2Y purinoceptor 13 (P2RY13) PBEF1 Nicotinamide phosphoribosyltransferase (NAmPRTase or Nampt) also known as pre-B-cell colony-enhancing factor 1 (PBEF1) or visfatin PCK1 Phosphoenolpyruvate carboxykinase PICALM phosphatidylinositol binding clathrin assembly protein (PICALM) PLAU Urokinase-type plasminogen activator (PLAU) PLXNCl Plexin C1 (PLXNC1) PRNP Prion protein PSEN1 presenilin 1 protein (PSEN1) PSEN2 presenilin 2 protein (PSEN2) PTPRA protein tyrosine phosphatase receptor type A protein (PTPRA) RALGPS2 Ral GEF with PH domain and SH3 binding motif 2 (RALGPS2) RGSL2 regulator of G-protein signaling like 2 (RGSL2) SELENBPl Selenium binding protein 1 (SELNBP1) SLC25A37 Mitoferrin-1 SORL1 sortilin-related receptor L(DLR class) A repeats-containing protein (SORL1) TF Transferrin TFAM Mitochondrial transcription factor A TNF Tumor necrosis factor TNFRSF10C Tumor necrosis factor receptor superfamily member 10C (TNFRSF10C) TNFSF10 Tumor necrosis factor receptor superfamily, (TRAIL) member 10a (TNFSF10) UBA1 ubiquitin-like modifier activating enzyme 1 (UBA1) UBA3 NEDD8-activating enzyme El catalytic subunit protein (UBE1C) UBB ubiquitin B protein (UBB) UBQLN1 Ubiquilin-1 UCHL1 ubiquitin carboxyl-terminal esterase L1 protein (UCHL1) UCLL3 ubiquitin carboxyl-terminal hydrolase isozyme L3 protein (UCHL3) VLDLR very low density lipoprotein receptor protein (VLDLR).

[1352] In exemplary embodiments, the proteins associated with AD whose chromosomal sequence is edited may be the very low density lipoprotein receptor protein (VLDLR) encoded by the VLDLR gene, the ubiquitin-like modifier activating enzyme 1 (UBA1) encoded by the UBA1 gene, the NEDD8-activating enzyme El catalytic subunit protein (UBE1C) encoded by the UBA3 gene, the aquaporin 1 protein (AQP1) encoded by the AQP1 gene, the ubiquitin carboxyl-terminal esterase L1 protein (UCHL1) encoded by the UCHL1 gene, the ubiquitin carboxyl-terminal hydrolase isozyme L3 protein (UCHL3) encoded by the UCL3 gene, the ubiquitin B protein (UBB) encoded by the UBB gene, the microtubule-associated protein tau (MAPT) encoded by the MAPT gene, the protein tyrosine phosphatase receptor type A protein (PTPRA) encoded by the PTPRA gene, the phosphatidylinositol binding clathrin assembly protein (PICALM) encoded by the PICALM gene, the clusterin protein (also known as apoplipoprotein J) encoded by the CLU gene, the presenilin 1 protein encoded by the PSEN1 gene, the presenilin 2 protein encoded by the PSEN2 gene, the sortilin-related receptor L(DLR class) A repeats-containing protein (SORL1) protein encoded by the SORL1 gene, the amyloid precursor protein (APP) encoded by the APP gene, the Apolipoprotein E precursor (APOE) encoded by the APOE gene, or the brain-derived neurotrophic factor (BDNF) encoded by the BDNF gene. In an exemplary embodiment, the genetically modified animal is a rat, and the edited chromosomal sequence encoding the protein associated with AD is as follows: APP amyloid precursor protein (APP) NM_019288 AQP1 aquaporin 1 protein (AQP1) NM_012778 BDNF Brain-derived neurotrophic factor NM_012513 CLU clusterin protein (also known as NM_053021 apoplipoprotein J) MAPT microtubule-associated protein NM_017212 tau (MAPT) PICALM phosphatidylinositol binding NM_053554 clathrin assembly protein (PICALM) PSEN1 presenilin 1 protein (PSEN1) NM_019163 PSEN2 presenilin 2 protein (PSEN2) NM_031087 PTPRA protein tyrosine phosphatase NM_012763 receptor type A protein (PTPRA) SORL1 sortilin-related receptor L(DLR NM_053519, class) A repeats-containing XM_001065506, protein (SORL1) XM_217115 UBA1 ubiquitin-like modifier activating NM_001014080 enzyme 1 (UBA1) UBA3 NEDD8-activating enzyme E1 NM_057205 catalytic subunit protein (UBE1C) UBB ubiquitin B protein (UBB) NM_138895 UCHL1 ubiquitin carboxyl-terminal NM_017237 esterase L1 protein (UCHL1) UCHL3 ubiquitin carboxyl-terminal NM_001110165 hydrolase isozyme L3 protein (UCHL3) VLDLR very low density lipoprotein NM_013155 receptor protein (VLDLR)

[1353] The animal or cell may comprise 1, 2, 3, 4, 5, 6, 7, 8, 9, 10, 11, 12, 13, 14, 15 or more disrupted chromosomal sequences encoding a protein associated with AD and zero, 1, 2, 3, 4, 5, 6, 7, 8, 9, 10, 11, 12, 13, 14, 15 or more chromosomally integrated sequences encoding a protein associated with AD.

[1354] The edited or integrated chromosomal sequence may be modified to encode an altered protein associated with AD. A number of mutations in AD-related chromosomal sequences have been associated with AD. For instance, the V7171 (i.e. valine at position 717 is changed to isoleucine) missense mutation in APP causes familial AD. Multiple mutations in the presenilin-1 protein, such as H163R (i.e. histidine at position 163 is changed to arginine), A246E (i.e. alanine at position 246 is changed to glutamate), L286V (i.e. leucine at position 286 is changed to valine) and C410Y (i.e. cysteine at position 410 is changed to tyrosine) cause familial Alzheimer's type 3. Mutations in the presenilin-2 protein, such as N141 I (i.e. asparagine at position 141 is changed to isoleucine), M239V (i.e. methionine at position 239 is changed to valine), and D439A (i.e. aspartate at position 439 is changed to alanine) cause familial Alzheimer's type 4. Other associations of genetic variants in AD-associated genes and disease are known in the art. See, for example, Waring et al. (2008) Arch. Neurol. 65:329-334, the disclosure of which is incorporated by reference herein in its entirety.

### Secretase Disorders

[1355] US Patent Publication No. 20110023146, describes use of zinc finger nucleases to genetically modify cells, animals and proteins associated with secretase-associated disorders. Secretases are essential for processing pre-proteins into their biologically active forms. A person with ordinary skill in the art may use the method disclosed herein in a system similar to that in US Patent Publication No. 20010023146 with the C2c1-CRISPR system as disclosed herein. With respect to the C2c1 protein, the CRISPR-C2c1 system may recognize a PAM sequence that is a T-rich sequence. In some embodiments, the PAM sequence is 5′ TTN 3′ or 5′ ATTN 3′, wherein N is any nucleotide. In some embodiments, the CRISPR-C2c1 system introduces one or more staggered double strand breaks (DSBs) with a 5′ overhang to the target gene. In particular embodiments, the 5′ overhang is 7 nt. In some embodiments, the CRISPR-C2c1 system introduces a template DNA sequence at the staggered DSB via HR or NHEJ. In some particular embodiments, the CRISPR-C2c1 system comprises a catalytically inactivated C2c1 protein associated with a functional domain that modifies the target gene. In a particular embodiment, the CRISPR-C2c1 system introduces a single mutation. In another particular embodiment, the CRISPR-C2c1 system introduces a single nucleotide modification to the transcript of the target gene.

[1356] Defects in various components of the secretase pathways contribute to many disorders, particularly those with hallmark amyloidogenesis or amyloid plaques, such as Alzheimer's disease (AD).

[1357] A secretase disorder and the proteins associated with these disorders are a diverse set of proteins that effect susceptibility for numerous disorders, the presence of the disorder, the severity of the disorder, or any combination thereof. The present disclosure comprises editing of any chromosomal sequences that encode proteins associated with a secretase disorder. The proteins associated with a secretase disorder are typically selected based on an experimental association of the secretase-related proteins with the development of a secretase disorder. For example, the production rate or circulating concentration of a protein associated with a secretase disorder may be elevated or depressed in a population with a secretase disorder relative to a population without a secretase disorder. Differences in protein levels may be assessed using proteomic techniques including but not limited to Western blot, immunohistochemical staining, enzyme linked immunosorbent assay (ELISA), and mass spectrometry. Alternatively, the protein associated with a secretase disorder may be identified by obtaining gene expression profiles of the genes encoding the proteins using genomic techniques including but not limited to DNA microarray analysis, serial analysis of gene expression (SAGE), and quantitative real-time polymerase chain reaction (Q-PCR).

[1358] By way of non-limiting example, proteins associated with a secretase disorder include PSENEN (presenilin enhancer 2 homolog (C. elegans)), CTSB (cathepsin B), PSEN1 (presenilin 1), APP (amyloid beta (A4) precursor protein), APH1B (anterior pharynx defective 1 homolog B (C. elegans)), PSEN2 (presenilin 2 (Alzheimer disease 4)), BACE1 (beta-site APP-cleaving enzyme 1), ITM2B (integral membrane protein 2B), CTSD (cathepsin D), NOTCHI (Notch homolog 1, translocation-associated (Drosophila)), TNF (tumor necrosis factor (TNF superfamily, member 2)), INS (insulin), DYT10 (dystonia 10), ADAM17 (ADAM metallopeptidase domain 17), APOE (apolipoprotein E), ACE (angiotensin I converting enzyme (peptidyl-dipeptidase A) 1), STN (statin), TP53 (tumor protein p53), IL6 (interleukin 6 (interferon, beta 2)), NGFR (nerve growth factor receptor (TNFR superfamily, member 16)), IL1B (interleukin 1, beta), ACHE (acetylcholinesterase (Yt blood group)), CTNNB1 (catenin (cadherin-associated protein), beta 1, 88 kDa), IGF1 (insulin-like growth factor 1 (somatomedin C)), IFNG (interferon, gamma), NRG1 (neuregulin 1), CASP3 (caspase 3, apoptosis-related cysteine peptidase), MAPK1 (mitogen-activated protein kinase 1), CDH1 (cadherin 1, type 1, E-cadherin (epithelial)), APBB1 (amyloid beta (A4) precursor protein-binding, family B, member 1 (Fe65)), HMGCR (3-hydroxy-3-methylglutaryl-Coenzyme A reductase), CREB1 (cAMP responsive element binding protein 1), PTGS2 (prostaglandin-endoperoxide synthase 2 (prostaglandin G/H synthase and cyclooxygenase)), HES1 (hairy and enhancer of split 1, (Drosophila)), CAT (catalase), TGFB1 (transforming growth factor, beta 1), ENO2 (enolase 2 (gamma, neuronal)), ERBB4 (v-erb-a erythroblastic leukemia viral oncogene homolog 4 (avian)), TRAPPC10 (trafficking protein particle complex 10), MAOB (monoamine oxidase B), NGF (nerve growth factor (beta polypeptide)), MMP12 (matrix metallopeptidase 12 (macrophage elastase)), JAG1 (agged 1 (Alagille syndrome)), CD40LG (CD40 ligand), PPARG (peroxisome proliferator-activated receptor gamma), FGF2 (fibroblast growth factor 2 (basic)), IL3 (interleukin 3 (colony-stimulating factor, multiple)), LRP1 (low density lipoprotein receptor-related protein 1), NOTCH4 (Notch homolog 4 (Drosophila)), MAPK8 (mitogen-activated protein kinase 8), PREP (prolyl endopeptidase), NOTCH3 (Notch homolog 3 (Drosophila)), PRNP (prion protein), CTSG (cathepsin G), EGF (epidermal growth factor (beta-urogastrone)), REN (renin), CD44 (CD44 molecule (Indian blood group)), SELP (selectin P (granule membrane protein 140 kDa, antigen CD62)), GHR (growth hormone receptor), ADCYAP1 (adenylate cyclase activating polypeptide 1 (pituitary)), INSR (insulin receptor), GFAP (glial fibrillary acidic protein), MMP3 (matrix metallopeptidase 3 (stromelysin 1, progelatinase)), MAPK10 (mitogen-activated protein kinase 10), SP1 (Spl transcription factor), MYC (v-myc myelocytomatosis viral oncogene homolog (avian)), CTSE (cathepsin E), PPARA (peroxisome proliferator-activated receptor alpha), JUN (un oncogene), TIMP1 (TIMP metallopeptidase inhibitor 1), ILS (interleukin 5 (colony-stimulating factor, eosinophil)), ILlA (interleukin 1, alpha), MMP9 (matrix metallopeptidase 9 (gelatinase B, 92 kDa gelatinase, 92 kDa type IV collagenase)), HTR4 (5-hydroxytryptamine (serotonin) receptor 4), HSPG2 (heparan sulfate proteoglycan 2), KRAS (v-Ki-ras2 Kirsten rat sarcoma viral oncogene homolog), CYCS (cytochrome c, somatic), SMG1 (SMG1 homolog, phosphatidylinositol 3-kinase-related kinase (C. elegans)), IL1R1 (interleukin 1 receptor, type I), PROK1 (prokineticin 1), MAPK3 (mitogen-activated protein kinase 3), NTRK1 (neurotrophic tyrosine kinase, receptor, type 1), IL13 (interleukin 13), MME (membrane metallo-endopeptidase), TKT (transketolase), CXCR2 (chemokine (C-X-C motif) receptor 2), IGF1R (insulin-like growth factor 1 receptor), RARA (retinoic acid receptor, alpha), CREBBP (CREB binding protein), PTGS1 (prostaglandin-endoperoxide synthase 1 (prostaglandin G/H synthase and cyclooxygenase)), GALT (galactose-1-phosphate uridylyltransferase), CHRM1 (cholinergic receptor, muscarinic 1), ATXN1 (ataxin 1), PAWR (PRKC, apoptosis, WT1, regulator), NOTCH2 (Notch homolog 2 (Drosophila)), M6PR (mannose-6-phosphate receptor (cation dependent)), CYP46A1 (cytochrome P450, family 46, subfamily A, polypeptide 1), CSNK1 D (casein kinase 1, delta), MAPK14 (mitogen-activated protein kinase 14), PRG2 (proteoglycan 2, bone marrow (natural killer cell activator, eosinophil granule major basic protein)), PRKCA (protein kinase C, alpha), L1 CAM (L1 cell adhesion molecule), CD40 (CD40 molecule, TNF receptor superfamily member 5), NR1I2 (nuclear receptor subfamily 1, group I, member 2), JAG2 (jagged 2), CTNND1 (catenin (cadherin-associated protein), delta 1), CDH2 (cadherin 2, type 1, N-cadherin (neuronal)), CMA1 (chymase 1, mast cell), SORT1 (sortilin 1), DLK1 (delta-like 1 homolog (Drosophila)), THEM4 (thioesterase superfamily member 4), JUP (junction plakoglobin), CD46 (CD46 molecule, complement regulatory protein), CCL11 (chemokine (C-C motif) ligand 11), CAV3 (caveolin 3), RNASE3 (ribonuclease, RNase A family, 3 (eosinophil cationic protein)), HSPA8 (heat shock 70 kDa protein 8), CASP9 (caspase 9, apoptosis-related cysteine peptidase), CYP3A4 (cytochrome P450, family 3, subfamily A, polypeptide 4), CCR3 (chemokine (C-C motif) receptor 3), TFAP2A (transcription factor AP-2 alpha (activating enhancer binding protein 2 alpha)), SCP2 (sterol carrier protein 2), CDK4 (cyclin-dependent kinase 4), HIF1A (hypoxia inducible factor 1, alpha subunit (basic helix-loop-helix transcription factor)), TCF7L2 (transcription factor 7-like 2 (T-cell specific, HMG-box)), IL1R2 (interleukin 1 receptor, type II), B3GALTL (beta 1,3-galactosyltransferase-like), MDM2 (Mdm2 p53 binding protein homolog (mouse)), RELA (v-rel reticuloendotheliosis viral oncogene homolog A (avian)), CASP7 (caspase 7, apoptosis-related cysteine peptidase), IDE (insulin-degrading enzyme), FABP4 (fatty acid binding protein 4, adipocyte), CASK (calcium/calmodulin-dependent serine protein kinase (MAGUK family)), ADCYAP1R1 (adenylate cyclase activating polypeptide 1 (pituitary) receptor type I), ATF4 (activating transcription factor 4 (tax-responsive enhancer element B67)), PDGFA (platelet-derived growth factor alpha polypeptide), C21 or f33 (chromosome 21 open reading frame 33), SCG5 (secretogranin V (7B2 protein)), RNF123 (ring finger protein 123), NFKB1 (nuclear factor of kappa light polypeptide gene enhancer in B-cells 1), ERBB2 (v-erb-b2 erythroblastic leukemia viral oncogene homolog 2, neuro/glioblastoma derived oncogene homolog (avian)), CAV1 (caveolin 1, caveolae protein, 22 kDa), MMP7 (matrix metallopeptidase 7 (matrilysin, uterine)), TGFA (transforming growth factor, alpha), RXRA (retinoid×receptor, alpha), STX1A (syntaxin 1A (brain)), PSMC4 (proteasome (prosome, macropain) 26S subunit, ATPase, 4), P2RY2 (purinergic receptor P2Y, G-protein coupled, 2), TNFRSF21 (tumor necrosis factor receptor superfamily, member 21), DLG1 (discs, large homolog 1 (Drosophila)), NUMBL (numb homolog (Drosophila)-like), SPN (sialophorin), PLSCR1 (phospholipid scramblase 1), UBQLN2 (ubiquilin 2), UBQLN1 (ubiquilin 1), PCSK7 (proprotein convertase subtilisin/kexin type 7), SPON1 (spondin 1, extracellular matrix protein), SILV (silver homolog (mouse)), QPCT (glutaminyl-peptide cyclotransferase), HESS (hairy and enhancer of split 5 (Drosophila)), GCC1 (GRIP and coiled-coil domain containing 1), and any combination thereof.

[1359] The genetically modified animal or cell may comprise 1, 2, 3, 4, 5, 6, 7, 8, 9, 10 or more disrupted chromosomal sequences encoding a protein associated with a secretase disorder and zero, 1, 2, 3, 4, 5, 6, 7, 8, 9, 10 or more chromosomally integrated sequences encoding a disrupted protein associated with a secretase disorder.

[1360] ALS

[1361] US Patent Publication No. 20110023144, describes use of zinc finger nucleases to genetically modify cells, animals and proteins associated with amyotrophyic lateral sclerosis (ALS) disease. ALS is characterized by the gradual steady degeneration of certain nerve cells in the brain cortex, brain stem, and spinal cord involved in voluntary movement. A person with ordinary skill in the art may use the method disclosed herein in a system similar to that in US Patent Publication No. 20110023144 with the C2c1-CRISPR system as disclosed herein. With respect to the C2c1 protein, the CRISPR-C2c1 system may recognize a PAM sequence that is a T-rich sequence. In some embodiments, the PAM sequence is 5′ TTN 3′ or 5′ ATTN 3′, wherein N is any nucleotide. In some embodiments, the CRISPR-C2c1 system introduces one or more staggered double strand breaks (DSBs) with a 5′ overhang to the target gene. In particular embodiments, the 5′ overhang is 7 nt. In some embodiments, the CRISPR-C2c1 system introduces a template DNA sequence at the staggered DSB via HR or NHEJ. In preferred embodiments, the staggered DSB is repaired via HR independent mechanism, such as NHEJ. In some embodiments, the target cell is a non-dividing cell. In a particular embodiment, the target cell is a motor neuron. In some particular embodiments, the CRISPR-C2c1 system comprises a catalytically inactivated C2c1 protein associated with a functional domain that modifies the target gene. In a particular embodiment, the CRISPR-C2c1 system introduces a single mutation. In another particular embodiment, the CRISPR-C2c1 system introduces a single nucleotide modification to the transcript of the target gene.

[1362] Motor neuron disorders and the proteins associated with these disorders are a diverse set of proteins that effect susceptibility for developing a motor neuron disorder, the presence of the motor neuron disorder, the severity of the motor neuron disorder or any combination thereof. The present disclosure comprises editing of any chromosomal sequences that encode proteins associated with ALS disease, a specific motor neuron disorder. The proteins associated with ALS are typically selected based on an experimental association of ALS-related proteins to ALS. For example, the production rate or circulating concentration of a protein associated with ALS may be elevated or depressed in a population with ALS relative to a population without ALS. Differences in protein levels may be assessed using proteomic techniques including but not limited to Western blot, immunohistochemical staining, enzyme linked immunosorbent assay (ELISA), and mass spectrometry. Alternatively, the proteins associated with ALS may be identified by obtaining gene expression profiles of the genes encoding the proteins using genomic techniques including but not limited to DNA microarray analysis, serial analysis of gene expression (SAGE), and quantitative real-time polymerase chain reaction (Q-PCR).

[1363] By way of non-limiting example, proteins associated with ALS include but are not limited to the following proteins: SOD1 superoxide dismutase 1, ALS3 amyotrophic lateral soluble sclerosis 3 SETX senataxin ALS5 amyotrophic lateral sclerosis 5 FUS fused in sarcoma ALS7 amyotrophic lateral sclerosis 7 ALS2 amyotrophic lateral DPP6 Dipeptidyl-peptidase 6 sclerosis 2 NEFH neurofilament, heavy PTGS1 prostaglandin-polypeptide endoperoxide synthase 1 SLC1A2 solute carrier family 1 TNFRSF10B tumor necrosis factor (glial high affinity receptor superfamily, glutamate transporter), member 10b member 2 PRPH peripherin HSP90AA1 heat shock protein 90 kDa alpha (cytosolic), class A member 1 GRIA2 glutamate receptor, IFNG interferon, gamma ionotropic, AMPA 2 S100B S100 calcium binding FGF2 fibroblast growth factor 2 protein B AOX1 aldehyde oxidase 1 CS citrate synthase TARDBP TAR DNA binding protein TXN thioredoxin RAPH1 Ras association MAP3K5 mitogen-activated protein (RaIGDS/AF-6) and kinase 5 pleckstrin homology domains 1 NBEAL1 neurobeachin-like 1 GPX1 glutathione peroxidase 1 ICA1L islet cell autoantigen RAC1 ras-related C3 botulinum 1.69 kDa-like toxin substrate 1 MAPT microtubule-associated ITPR2 inositol 1,4,5-protein tau triphosphate receptor, type 2 ALS2CR4 amyotrophic lateral GLS glutaminase sclerosis 2 (juvenile) chromosome region, candidate 4 ALS2CR8 amyotrophic lateral CNTFR ciliary neurotrophic factor sclerosis 2 (juvenile) receptor chromosome region, candidate 8 ALS2CR11 amyotrophic lateral FOLH1 folate hydrolase 1 sclerosis 2 (juvenile) chromosome region, candidate 11 FAM117B family with sequence P4HB prolyl 4-hydroxylase, similarity 117, member B beta polypeptide CNTF ciliary neurotrophic factor SQSTM1 sequestosome 1 STRADB STE20-related kinase NAIP NLR family, apoptosis adaptor beta inhibitory protein YWHAQ tyrosine 3-SLC33A1 solute carrier family 33 monooxygenase/tryptoph (acetyl-CoA transporter), an 5-monooxygenase member 1 activation protein, theta polypeptide TRAK2 trafficking protein, homolog, SAC1 kinesin binding 2 lipid phosphatase domain containing NIF3L1 NIF3 NGG1 interacting INA internexin neuronal factor 3-like 1 intermediate filament protein, alpha PARD3B par-3 partitioning COX8A cytochrome c oxidase defective 3 homolog B subunit VIIIA CDK15 cyclin-dependent kinase HECW1 HECT, C2 and WW 15 domain containing E3 ubiquitin protein ligase 1 NOS1 nitric oxide synthase 1 MET met proto-oncogene SOD2 superoxide dismutase 2, HSPB1 heat shock 27 kDa mitochondrial protein 1 NEFL neurofilament, light CTSB cathepsin B polypeptide ANG angiogenin, HSPA8 heat shock 70 kDa ribonuclease, RNase A protein 8 family, 5 VAPB VAMP (vesicle-ESR1 estrogen receptor 1 associated membrane protein)-associated protein B and C SNCA synuclein, alpha HGF hepatocyte growth factor CAT catalase ACTB actin, beta NEFM neurofilament, medium TH tyrosine hydroxylase polypeptide BCL2 B-cell CLL/lymphoma 2 FAS Fas (TNF receptor superfamily, member 6) CASP3 caspase 3, apoptosis-CLU clusterin related cysteine peptidase SMN1 survival of motor neuron G6PD glucose-6-phosphate 1, telomeric dehydrogenase BAX BCL2-associated X HSF1 heat shock transcription protein factor 1 RNF19A ring finger protein 19A JUN jun oncogene ALS2CR12 amyotrophic lateral HSPA5 heat shock 70 kDa sclerosis 2 (juvenile) protein 5 chromosome region, candidate 12 MAPK14 mitogen-activated protein IL10 interleukin 10 kinase 14 APEX1 APEX nuclease TXNRD1 thioredoxin reductase 1 (multifunctional DNA repair enzyme) 1 NOS2 nitric oxide synthase 2, TIMP1 TIMP metallopeptidase inducible inhibitor 1 CASP9 caspase 9, apoptosis-XIAP X-linked inhibitor of related cysteine apoptosis peptidase GLG1 golgi glycoprotein 1 EPO erythropoietin VEGFA vascular endothelial ELN elastin growth factor A GDNF glial cell derived NFE2L2 nuclear factor (erythroid-neurotrophic factor derived 2)-like 2 SLC6A3 solute carrier family 6 HSPA4 heat shock 70 kDa (neurotransmitter protein 4 transporter, dopamine), member 3 APOE apolipoprotein E PSMB8 proteasome (prosome, macropain) subunit, beta type, 8 DCTN1 dynactin 1 TIMP3 TIMP metallopeptidase inhibitor 3 KIFAP3 kinesin-associated SLC1A1 solute carrier family 1 protein 3 (neuronal/epithelial high affinity glutamate transporter, system Xag), member 1 SMN2 survival of motor neuron CCNC cyclin C 2, centromeric MPP4 membrane protein, STUB1 STIP1 homology and U-palmitoylated 4 box containing protein 1 ALS2 amyloid beta (A4) PRDX6 peroxiredoxin 6 precursor protein SYP synaptophysin CABINI calcineurin binding protein 1 CASP1 caspase 1, apoptosis-GART phosphoribosylglycinami related cysteine de formyltransferase, peptidase phosphoribosylglycinami de synthetase, phosphoribosylaminoimi dazole synthetase CDK5 cyclin-dependent kinase 5 ATXN3 ataxin 3 RTN4 reticulon 4 ClQB complement component 1, q subcomponent, B chain VEGFC nerve growth factor HTT huntingtin receptor PARK7 Parkinson disease 7 XDH xanthine dehydrogenase GFAP glial fibrillary acidic MAP2 microtubule-associated protein protein 2 CYCS cytochrome c, somatic FCGR3B Fc fragment of IgG, low affinity IIIb, CCS copper chaperone for UBL5 ubiquitin-like 5 superoxide dismutase MMP9 matrix metallopeptidase SLC18A3 solute carrier family 18 9 ((vesicular acetylcholine), member 3 TRPM7 transient receptor HSPB2 heat shock 27 kDa potential cation channel, protein 2 subfamily M, member 7 AKT1 v-akt murine thymoma DERL1 Derl-like domain family, viral oncogene homolog 1 member 1 CCL2 chemokine (C—C motif) NGRN neugrin, neurite ligand 2 outgrowth associated GSR glutathione reductase TPPP3 tubulin polymerization-promoting protein family member 3 APAF1 apoptotic peptidase BTBD10 BTB (POZ) domain activating factor 1 containing 10 GLUD1 glutamate CXCR4 chemokine (C-X-C motif) dehydrogenase 1 receptor 4 SLC1A3 solute carrier family 1 FLT1 fms-related tyrosine (glial high affinity glutamate transporter), member 3 kinase 1 PON1 paraoxonase 1 AR androgen receptor LIF leukemia inhibitory factor ERBB3 v-erb-b2 erythroblastic leukemia viral oncogene homolog 3 LGALS1 lectin, galactoside-CD44 CD44 molecule binding, soluble, 1 TP53 tumor protein p53 TLR3 toll-like receptor 3 GRIA1 glutamate receptor, GAPDH glyceraldehyde-3-ionotropic, AMPA 1 phosphate dehydrogenase GRIK1 glutamate receptor, DES desmin ionotropic, kainate 1 CHAT choline acetyltransferase FLT4 fms-related tyrosine kinase 4 CHMP2B chromatin modifying BAG1 BCL2-associated protein 2B athanogene MT3 metallothionein 3 CHRNA4 cholinergic receptor, nicotinic, alpha 4 GSS glutathione synthetase BAK1 BCL2-antagonist/killer 1 KDR kinase insert domain GSTP1 glutathione S-transferase receptor (a type III pi 1 receptor tyrosine kinase) OGG1 8-oxoguanine DNA IL6 interleukin 6 (interferon, glycosylase beta 2).

[1364] The animal or cell may comprise 1, 2, 3, 4, 5, 6, 7, 8, 9, 10 or more disrupted chromosomal sequences encoding a protein associated with ALS and zero, 1, 2, 3, 4, 5, 6, 7, 8, 9, 10 or more chromosomally integrated sequences encoding the disrupted protein associated with ALS. Preferred proteins associated with ALS include SOD1 (superoxide dismutase 1), ALS2 (amyotrophic lateral sclerosis 2), FUS (fused in sarcoma), TARDBP (TAR DNA binding protein), VAGFA (vascular endothelial growth factor A), VAGFB (vascular endothelial growth factor B), and VAGFC (vascular endothelial growth factor C), and any combination thereof.

[1365] Autism

[1366] US Patent Publication No. 20110023145, describes use of zinc finger nucleases to genetically modify cells, animals and proteins associated with autism spectrum disorders (ASD). Autism spectrum disorders (ASDs) are a group of disorders characterized by qualitative impairment in social interaction and communication, and restricted repetitive and stereotyped patterns of behavior, interests, and activities. The three disorders, autism, Asperger syndrome (AS) and pervasive developmental disorder-not otherwise specified (PDD-NOS) are a continuum of the same disorder with varying degrees of severity, associated intellectual functioning and medical conditions. ASDs are predominantly genetically determined disorders with a heritability of around 90%.

[1367] US Patent Publication No. 20110023145 comprises editing of any chromosomal sequences that encode proteins associated with ASD which may be applied to the CRISPR Cas system of the present invention. The proteins associated with ASD are typically selected based on an experimental association of the protein associated with ASD to an incidence or indication of an ASD. For example, the production rate or circulating concentration of a protein associated with ASD may be elevated or depressed in a population having an ASD relative to a population lacking the ASD. Differences in protein levels may be assessed using proteomic techniques including but not limited to Western blot, immunohistochemical staining, enzyme linked immunosorbent assay (ELISA), and mass spectrometry. Alternatively, the proteins associated with ASD may be identified by obtaining gene expression profiles of the genes encoding the proteins using genomic techniques including but not limited to DNA microarray analysis, serial analysis of gene expression (SAGE), and quantitative real-time polymerase chain reaction (Q-PCR). A person with ordinary skill in the art may use the method disclosed herein in a system similar to that in US Patent Publication No. 20110023145 with the C2c1-CRISPR system as disclosed herein. With respect to the C2c1 protein, the CRISPR-C2c1 system may recognize a PAM sequence that is a T-rich sequence. In some embodiments, the PAM sequence is 5′ TTN 3′ or 5′ ATTN 3′, wherein N is any nucleotide. In some embodiments, the CRISPR-C2c1 system introduces one or more staggered double strand breaks (DSBs) with a 5′ overhang to the target gene. In particular embodiments, the 5′ overhang is 7 nt. In some embodiments, the CRISPR-C2c1 system introduces a template DNA sequence at the staggered DSB via HR or NHEJ. In some particular embodiments, the CRISPR-C2c1 system comprises a catalytically inactivated C2c1 protein associated with a functional domain that modifies the target gene. In a particular embodiment, the CRISPR-C2c1 system introduces a single mutation. In another particular embodiment, the CRISPR-C2c1 system introduces a single nucleotide modification to the transcript of the target gene.

[1368] Non limiting examples of disease states or disorders that may be associated with proteins associated with ASD include autism, Asperger syndrome (AS), pervasive developmental disorder-not otherwise specified (PDD-NOS), Rett's syndrome, tuberous sclerosis, phenylketonuria, Smith-Lemli-Opitz syndrome and fragile X syndrome. By way of non-limiting example, proteins associated with ASD include but are not limited to the following proteins: ATP10C aminophospholipid-MET MET receptor transporting ATPase tyrosine kinase (ATP10C) BZRAP1 MGLUR5 (GRM5) Metabotropic glutamate receptor 5 (MGLUR5) CDH10 Cadherin-10 MGLUR6 (GRM6) Metabotropic glutamate receptor 6 (MGLUR6) CDH9 Cadherin-9 NLGN1 Neuroligin-1 CNTN4 Contactin-4 NLGN2 Neuroligin-2 CNTNAP2 Contactin-associated SEMASA Neuroligin-3 protein-like 2 (CNTNAP2) DHCR7 7-dehydrocholesterol NLGN4X Neuroligin-4 X-reductase (DHCR7) linked DOC2A Double C2-like domain-NLGN4Y Neuroligin-4 Y-containing protein alpha linked DPP6 Dipeptidyl NLGN5 Neuroligin-5 aminopeptidase-like protein 6 EN2 engrailed 2 (EN2) NRCAM Neuronal cell adhesion molecule (NRCAM) MDGA2 fragile X mental retardation NRXN1 Neurexin-1 1 (MDGA2) FMR2 (AFF2) AF4/FMR2 family member 2 OR4M2 Olfactory receptor (AFF2) 4M2 FOXP2 Forkhead box protein P2 OR4N4 Olfactory receptor (FOXP2) 4N4 FXR1 Fragile X mental OXTR oxytocin receptor retardation, autosomal (OXTR) homolog 1 (FXR1) FXR2 Fragile X mental PAH phenylalanine retardation, autosomal hydroxylase (PAH) homolog 2 (FXR2) GABRA1 Gamma-aminobutyric acid PTEN Phosphatase and receptor subunit alpha-1 tensin homologue (GABRA1) (PTEN) GABRA5 GABAA (.gamma.-aminobutyric PTPRZl Receptor-type acid) receptor alpha 5 tyrosine-protein subunit (GABRA5) phosphatase zeta (PTPRZ1) GABRB1 Gamma-aminobutyric acid RELN Reelin receptor subunit beta-1 (GABRB1) GABRB3 GABAA (.gamma.-aminobutyric RPL10 60S ribosomal acid) receptor.beta.3 subunit protein L10 (GABRB3) GABRG1 Gamma-aminobutyric acid SEMASA Semaphorin-5A receptor subunit gamma-1 (SEMASA) (GABRG1) HIRIP3 HIRA-interacting protein 3 SEZ6L2 seizure related 6 homolog (mouse)-like 2 HOXA1 Homeobox protein Hox-A1 SHANK3 SH3 and multiple (HOXA1) ankyrin repeat domains 3 (SHANK3) IL6 Interleukin-6 SHBZRAP1 SH3 and multiple ankyrin repeat domains 3 (SHBZRAP1) LAMB1 Laminin subunit beta-1 SLC6A4 Serotonin (LAMB1) transporter (SERT) MAPK3 Mitogen-activated protein TAS2R1 Taste receptor kinase 3 type 2 member 1 TAS2R1 MAZ Myc-associated zinc finger TSC1 Tuberous sclerosis protein protein 1 MDGA2 MAM domain containing TSC2 Tuberous sclerosis glycosylphosphatidylinositol protein 2 anchor 2 (MDGA2) MECP2 Methyl CpG binding UBE3A Ubiquitin protein protein 2 (MECP2) ligase E3A (UBE3A) MECP2 methyl CpG binding WNT2 Wingless-type protein 2 (MECP2) MMTV integration site family, member 2 (WNT2)

[1369] The identity of the protein associated with ASD whose chromosomal sequence is edited can and will vary. In preferred embodiments, the proteins associated with ASD whose chromosomal sequence is edited may be the benzodiazapine receptor (peripheral) associated protein 1 (BZRAP1) encoded by the BZRAP1 gene, the AF4/FMR2 family member 2 protein (AFF2) encoded by the AFF2 gene (also termed MFR2), the fragile X mental retardation autosomal homolog 1 protein (FXR1) encoded by the FXR1 gene, the fragile X mental retardation autosomal homolog 2 protein (FXR2) encoded by the FXR2 gene, the MAM domain containing glycosylphosphatidylinositol anchor 2 protein (MDGA2) encoded by the MDGA2 gene, the methyl CpG binding protein 2 (MECP2) encoded by the MECP2 gene, the metabotropic glutamate receptor 5 (MGLUR5) encoded by the MGLUR5-1 gene (also termed GRM5), the neurexin 1 protein encoded by the NRXN1 gene, or the semaphorin-5A protein (SEMA5A) encoded by the SEMA5A gene. In an exemplary embodiment, the genetically modified animal is a rat, and the edited chromosomal sequence encoding the protein associated with ASD is as listed below: BZRAP benzodiazapine receptor XM_002727789, (peripheral) associated XM_213427, protein 1 (BZRAP1) XM_002724533, XM_001081125 AFF2 (FMR2) AF4/FMR2 family member 2 XM_219832, (AFF2) XM_001054673 FXR1 Fragile X mental NM_001012179 retardation, autosomal homolog 1 (FXR1) FXR2 Fragile X mental NM_001100647 retardation, autosomal homolog 2 (FXR2) MDGA2 MAM domain containing NM_199269 glycosylphosphatidylinositol anchor 2 (MDGA2) MECP2 Methyl CpG binding NM_022673 protein 2 (MECP2) MGLUR5 Metabotropic glutamate NM_017012 (GRM5) receptor 5 (MGLUR5) NRXN1 Neurexin-1 NM_021767 SEMA5A Semaphorin-5A (SEMA5A) NM_001107659.

### Trinucleotide Repeat Expansion Disorders

[1370] US Patent Publication No. 20110016540, describes use of zinc finger nucleases to genetically modify cells, animals and proteins associated with trinucleotide repeat expansion disorders. Trinucleotide repeat expansion disorders are complex, progressive disorders that involve developmental neurobiology and often affect cognition as well as sensori-motor functions. A person with ordinary skill in the art may use the method disclosed herein in a system similar to that in US Patent Publication No. 20110016540 with the C2c1-CRISPR system as disclosed herein. With respect to the C2c1 protein, the CRISPR-C2c1 system may recognize a PAM sequence that is a T-rich sequence. In some embodiments, the PAM sequence is 5′ TTN 3′ or 5′ ATTN 3′, wherein N is any nucleotide. In some embodiments, the CRISPR-C2c1 system introduces one or more staggered double strand breaks (DSBs) with a 5′ overhang to the target gene. In particular embodiments, the 5′ overhang is 7 nt. In some embodiments, the CRISPR-C2c1 system introduces a template DNA sequence at the staggered DSB via HR or NHEJ. In some particular embodiments, the CRISPR-C2c1 system comprises a catalytically inactivated C2c1 protein associated with a functional domain that modifies the target gene. In a particular embodiment, the CRISPR-C2c1 system introduces a single mutation. In another particular embodiment, the CRISPR-C2c1 system introduces a single nucleotide modification to the transcript of the target gene.

[1371] Trinucleotide repeat expansion proteins are a diverse set of proteins associated with susceptibility for developing a trinucleotide repeat expansion disorder, the presence of a trinucleotide repeat expansion disorder, the severity of a trinucleotide repeat expansion disorder or any combination thereof. Trinucleotide repeat expansion disorders are divided into two categories determined by the type of repeat. The most common repeat is the triplet CAG, which, when present in the coding region of a gene, codes for the amino acid glutamine (Q). Therefore, these disorders are referred to as the polyglutamine (polyQ) disorders and comprise the following diseases: Huntington Disease (HD); Spinobulbar Muscular Atrophy (SBMA); Spinocerebellar Ataxias (SCA types 1, 2, 3, 6, 7, and 17); and Dentatorubro-Pallidoluysian Atrophy (DRPLA). The remaining trinucleotide repeat expansion disorders either do not involve the CAG triplet or the CAG triplet is not in the coding region of the gene and are, therefore, referred to as the non-polyglutamine disorders. The non-polyglutamine disorders comprise Fragile X Syndrome (FRAXA); Fragile XE Mental Retardation (FRAXE); Friedreich Ataxia (FRDA); Myotonic Dystrophy (DM); and Spinocerebellar Ataxias (SCA types 8, and 12).

[1372] The proteins associated with trinucleotide repeat expansion disorders are typically selected based on an experimental association of the protein associated with a trinucleotide repeat expansion disorder to a trinucleotide repeat expansion disorder. For example, the production rate or circulating concentration of a protein associated with a trinucleotide repeat expansion disorder may be elevated or depressed in a population having a trinucleotide repeat expansion disorder relative to a population lacking the trinucleotide repeat expansion disorder. Differences in protein levels may be assessed using proteomic techniques including but not limited to Western blot, immunohistochemical staining, enzyme linked immunosorbent assay (ELISA), and mass spectrometry. Alternatively, the proteins associated with trinucleotide repeat expansion disorders may be identified by obtaining gene expression profiles of the genes encoding the proteins using genomic techniques including but not limited to DNA microarray analysis, serial analysis of gene expression (SAGE), and quantitative real-time polymerase chain reaction (Q-PCR).

[1373] Non-limiting examples of proteins associated with trinucleotide repeat expansion disorders include AR (androgen receptor), FMR1 (fragile X mental retardation 1), HTT (huntingtin), DMPK (dystrophia myotonica-protein kinase), FXN (frataxin), ATXN2 (ataxin 2), ATN1 (atrophin 1), FEN1 (flap structure-specific endonuclease 1), TNRC6A (trinucleotide repeat containing 6A), PABPN1 (poly(A) binding protein, nuclear 1), JPH3 (junctophilin 3), MED15 (mediator complex subunit 15), ATXN1 (ataxin 1), ATXN3 (ataxin 3), TBP (TATA box binding protein), CACNA1A (calcium channel, voltage-dependent, P/Q type, alpha 1A subunit), ATXN80S (ATXN8 opposite strand (non-protein coding)), PPP2R2B (protein phosphatase 2, regulatory subunit B, beta), ATXN7 (ataxin 7), TNRC6B (trinucleotide repeat containing 6B), TNRC6C (trinucleotide repeat containing 6C), CELF3 (CUGBP, Elav-like family member 3), MAB21L1 (mab-21-like 1 (C. elegans)), MSH2 (mutS homolog 2, colon cancer, nonpolyposis type 1 (E. coli)), TMEM185A (transmembrane protein 185A), SIX5 (SIX homeobox 5), CNPY3 (canopy 3 homolog (zebrafish)), FRAXE (fragile site, folic acid type, rare, fra(X)(q28) E), GNB2 (guanine nucleotide binding protein (G protein), beta polypeptide 2), RPL14 (ribosomal protein L14), ATXN8 (ataxin 8), INSR (insulin receptor), TTR (transthyretin), EP400 (ElA binding protein p400), GIGYF2 (GRB10 interacting GYF protein 2), OGG1 (8-oxoguanine DNA glycosylase), STC1 (stanniocalcin 1), CNDP1 (carnosine dipeptidase 1 (metallopeptidase M20 family)), C10orf2 (chromosome 10 open reading frame 2), MAML3 mastermind-like 3 (Drosophila), DKC1 (dyskeratosis congenita 1, dyskerin), PAXIP1 (PAX interacting (with transcription-activation domain) protein 1), CASK (calcium/calmodulin-dependent serine protein kinase (MAGUK family)), MAPT (microtubule-associated protein tau), SP1 (SpI transcription factor), POLG (polymerase (DNA directed), gamma), AFF2 (AF4/FMR2 family, member 2), THBS1 (thrombospondin 1), TP53 (tumor protein p53), ESR1 (estrogen receptor 1), CGGBP1 (CGG triplet repeat binding protein 1), ABT1 (activator of basal transcription 1), KLK3 (kallikrein-related peptidase 3), PRNP (prion protein), JUN (jun oncogene), KCNN3 (potassium intermediate/small conductance calcium-activated channel, subfamily N, member 3), BAX (BCL2-associated X protein), FRAXA (fragile site, folic acid type, rare, fra(X)(q27.3) A (macroorchidism, mental retardation)), KBTBD10 (kelch repeat and BTB (POZ) domain containing 10), MBNL1 (muscleblind-like (Drosophila)), RAD51 (RAD51 homolog (RecA homolog, E. coli) (S. cerevisiae)), NCOA3 (nuclear receptor coactivator 3), ERDA1 (expanded repeat domain, CAG/CTG 1), TSC1 (tuberous sclerosis 1), COMP (cartilage oligomeric matrix protein), GCLC (glutamate-cysteine ligase, catalytic subunit), RRAD (Ras-related associated with diabetes), MSH3 (mutS homolog 3 (E. coli)), DRD2 (dopamine receptor D2), CD44 (CD44 molecule (Indian blood group)), CTCF (CCCTC-binding factor (zinc finger protein)), CCND1 (cyclin D1), CLSPN (claspin homolog (Xenopus laevis)), MEF2A (myocyte enhancer factor 2A), PTPRU (protein tyrosine phosphatase, receptor type, U), GAPDH (glyceraldehyde-3-phosphate dehydrogenase), TRIM22 (tripartite motif-containing 22), WT1 (Wilms tumor 1), AHR (aryl hydrocarbon receptor), GPX1 (glutathione peroxidase 1), TPMT (thiopurine S-methyltransferase), NDP (Norrie disease (pseudoglioma)), ARX (aristaless related homeobox), MUS81 (MUS81 endonuclease homolog (S. cerevisiae)), TYR (tyrosinase (oculocutaneous albinism IA)), EGR1 (early growth response 1), UNG (uracil-DNA glycosylase), NUMBL (numb homolog (Drosophila)-like), FABP2 (fatty acid binding protein 2, intestinal), EN2 (engrailed homeobox 2), CRYGC (crystallin, gamma C), SRP14 (signal recognition particle 14 kDa (homologous Alu RNA binding protein)), CRYGB (crystallin, gamma B), PDCD1 (programmed cell death 1), HOXA1 (homeobox A1), ATXN2L (ataxin 2-like), PMS2 (PMS2 postmeiotic segregation increased 2 (S. cerevisiae)), GLA (galactosidase, alpha), CBL (Cas-Br-M (murine) ecotropic retroviral transforming sequence), FTH1 (ferritin, heavy polypeptide 1), IL12RB2 (interleukin 12 receptor, beta 2), OTX2 (orthodenticle homeobox 2), HOXA5 (homeobox A5), POLG2 (polymerase (DNA directed), gamma 2, accessory subunit), DLX2 (distal-less homeobox 2), SIRPA (signal-regulatory protein alpha), OTX1 (orthodenticle homeobox 1), AHRR (aryl-hydrocarbon receptor repressor), MANF (mesencephalic astrocyte-derived neurotrophic factor), TMEM158 (transmembrane protein 158 (gene/pseudogene)), and ENSG00000078687.

[1374] Preferred proteins associated with trinucleotide repeat expansion disorders include HTT (Huntingtin), AR (androgen receptor), FXN (frataxin), Atxn3 (ataxin), Atxn1 (ataxin), Atxn2 (ataxin), Atxn7 (ataxin), Atxn10 (ataxin), DMPK (dystrophia myotonica-protein kinase), Atn1 (atrophin 1), CBP (creb binding protein), VLDLR (very low density lipoprotein receptor), and any combination thereof.

### Treating Hearing Diseases

[1375] The present invention also contemplates delivering the CRISPR-Cas system to one or both ears.

[1376] Researchers are looking into whether gene therapy could be used to aid current deafness treatments—namely, cochlear implants. Deafness is often caused by lost or damaged hair cells that cannot relay signals to auditory neurons. In such cases, cochlear implants may be used to respond to sound and transmit electrical signals to the nerve cells. But these neurons often degenerate and retract from the cochlea as fewer growth factors are released by impaired hair cells.

[1377] US patent application 20120328580 describes injection of a pharmaceutical composition into the ear (e.g., auricular administration), such as into the luminae of the cochlea (e.g., the Scala media, Sc vestibulae, and Sc tympani), e.g., using a syringe, e.g., a single-dose syringe. For example, one or more of the compounds described herein can be administered by intratympanic injection (e.g., into the middle ear), and/or injections into the outer, middle, and/or inner ear. Such methods are routinely used in the art, for example, for the administration of steroids and antibiotics into human ears. Injection can be, for example, through the round window of the ear or through the cochlear capsule. Other inner ear administration methods are known in the art (see, e.g., Salt and Plontke, Drug Discovery Today, 10:1299-1306, 2005).

[1378] In another mode of administration, the pharmaceutical composition can be administered in situ, via a catheter or pump. A catheter or pump can, for example, direct a pharmaceutical composition into the cochlear luminae or the round window of the ear and/or the lumen of the colon. Exemplary drug delivery apparatus and methods suitable for administering one or more of the compounds described herein into an ear, e.g., a human ear, are described by McKenna et al., (U.S. Publication No. 2006/0030837) and Jacobsen et al., (U.S. Pat. No. 7,206,639). In some embodiments, a catheter or pump can be positioned, e.g., in the ear (e.g., the outer, middle, and/or inner ear) of a patient during a surgical procedure. In some embodiments, a catheter or pump can be positioned, e.g., in the ear (e.g., the outer, middle, and/or inner ear) of a patient without the need for a surgical procedure.

[1379] Alternatively or in addition, one or more of the compounds described herein can be administered in combination with a mechanical device such as a cochlear implant or a hearing aid, which is worn in the outer ear. An exemplary cochlear implant that is suitable for use with the present invention is described by Edge et al., (U.S. Publication No. 2007/0093878).

[1380] In some embodiments, the modes of administration described above may be combined in any order and can be simultaneous or interspersed.

[1381] Alternatively or in addition, the present invention may be administered according to any of the Food and Drug Administration approved methods, for example, as described in CDER Data Standards Manual, version number 004 (which is available at fda.give/cder/dsm/DRG/drg00301.htm).

[1382] In general, the cell therapy methods described in US patent application 20120328580 can be used to promote complete or partial differentiation of a cell to or towards a mature cell type of the inner ear (e.g., a hair cell) in vitro. Cells resulting from such methods can then be transplanted or implanted into a patient in need of such treatment. The cell culture methods required to practice these methods, including methods for identifying and selecting suitable cell types, methods for promoting complete or partial differentiation of selected cells, methods for identifying complete or partially differentiated cell types, and methods for implanting complete or partially differentiated cells are described below.

[1383] Cells suitable for use in the present invention include, but are not limited to, cells that are capable of differentiating completely or partially into a mature cell of the inner ear, e.g., a hair cell (e.g., an inner and/or outer hair cell), when contacted, e.g., in vitro, with one or more of the compounds described herein. Exemplary cells that are capable of differentiating into a hair cell include, but are not limited to stem cells (e.g., inner ear stem cells, adult stem cells, bone marrow derived stem cells, embryonic stem cells, mesenchymal stem cells, skin stem cells, iPS cells, and fat derived stem cells), progenitor cells (e.g., inner ear progenitor cells), support cells (e.g., Deiters' cells, pillar cells, inner phalangeal cells, tectal cells and Hensen's cells), and/or germ cells. The use of stem cells for the replacement of inner ear sensory cells is described in Li et al., (U.S. Publication No. 2005/0287127) and Li et al., (U.S. patent Ser. No. 11/953,797). The use of bone marrow derived stem cells for the replacement of inner ear sensory cells is described in Edge et al., PCT/US2007/084654. iPS cells are described, e.g., at Takahashi et al., Cell, Volume 131, Issue 5, Pages 861-872 (2007); Takahashi and Yamanaka, Cell 126, 663-76 (2006); Okita et al., Nature 448, 260-262 (2007); Yu, J. et al., Science 318(5858):1917-1920 (2007); Nakagawa et al., Nat. Biotechnol. 26:101-106 (2008); and Zaehres and Scholer, Cell 131(5):834-835 (2007). Such suitable cells can be identified by analyzing (e.g., qualitatively or quantitatively) the presence of one or more tissue specific genes. For example, gene expression can be detected by detecting the protein product of one or more tissue-specific genes. Protein detection techniques involve staining proteins (e.g., using cell extracts or whole cells) using antibodies against the appropriate antigen. In this case, the appropriate antigen is the protein product of the tissue-specific gene expression. Although, in principle, a first antibody (i.e., the antibody that binds the antigen) can be labeled, it is more common (and improves the visualization) to use a second antibody directed against the first (e.g., an anti-IgG). This second antibody is conjugated either with fluorochromes, or appropriate enzymes for colorimetric reactions, or gold beads (for electron microscopy), or with the biotin-avidin system, so that the location of the primary antibody, and thus the antigen, can be recognized.

[1384] The CRISPR Cas molecules of the present invention may be delivered to the ear by direct application of pharmaceutical composition to the outer ear, with compositions modified from US Published application, 20110142917. In some embodiments the pharmaceutical composition is applied to the ear canal. Delivery to the ear may also be referred to as aural or optic delivery.

[1385] A person with ordinary skill in the art may use the method disclosed herein in a system similar as in above discussed patent publications with the C2c1-CRISPR system as disclosed herein. With respect to the C2c1 protein, the CRISPR-C2c1 system may recognize a PAM sequence that is a T-rich sequence. In some embodiments, the PAM sequence is 5′ TTN 3′ or 5′ ATTN 3′, wherein N is any nucleotide. In some embodiments, the CRISPR-C2c1 system introduces one or more staggered double strand breaks (DSBs) with a 5′ overhang to the target gene. In particular embodiments, the 5′ overhang is 7 nt. In some embodiments, the CRISPR-C2c1 system introduces a template DNA sequence at the staggered DSB via HR or NHEJ. In some particular embodiments, the CRISPR-C2c1 system comprises a catalytically inactivated C2c1 protein associated with a functional domain that modifies the target gene. In a particular embodiment, the CRISPR-C2c1 system introduces a single mutation. In another particular embodiment, the CRISPR-C2c1 system introduces a single nucleotide modification to the transcript of the target gene.

[1386] In some embodiments the RNA molecules of the invention are delivered in liposome or lipofectin formulations and the like and can be prepared by methods well known to those skilled in the art. Such methods are described, for example, in U.S. Pat. Nos. 5,593,972, 5,589,466, and 5,580,859, which are herein incorporated by reference.

[1387] Delivery systems aimed specifically at the enhanced and improved delivery of siRNA into mammalian cells have been developed, (see, for example, Shen et al FEBS Let. 2003, 539:111-114; Xia et al., Nat. Biotech. 2002, 20:1006-1010; Reich et al., Mol. Vision. 2003, 9: 210-216; Sorensen et al., J. Mol. Biol. 2003, 327: 761-766; Lewis et al., Nat. Gen. 2002, 32: 107-108 and Simeoni et al., NAR 2003, 31, 11: 2717-2724) and may be applied to the present invention. siRNA has recently been successfully used for inhibition of gene expression in primates (see for example. Tolentino et al., Retina 24(4):660 which may also be applied to the present invention.

[1388] Qi et al. discloses methods for efficient siRNA transfection to the inner ear through the intact round window by a novel proteidic delivery technology which may be applied to the nucleic acid-targeting system of the present invention (see, e.g., Qi et al., Gene Therapy (2013), 1-9). In particular, a TAT double stranded RNA-binding domains (TAT-DRBDs), which can transfect Cy3-labeled siRNA into cells of the inner ear, including the inner and outer hair cells, crista ampullaris, macula utriculi and macula sacculi, through intact round-window permeation was successful for delivering double stranded siRNAs in vivo for treating various inner ear ailments and preservation of hearing function. About 40 of 10 mM RNA may be contemplated as the dosage for administration to the ear.

[1389] According to Rejali et al. (Hear Res. 2007 June; 228(1-2):180-7), cochlear implant function can be improved by good preservation of the spiral ganglion neurons, which are the target of electrical stimulation by the implant and brain derived neurotrophic factor (BDNF) has previously been shown to enhance spiral ganglion survival in experimentally deafened ears. Rejali et al. tested a modified design of the cochlear implant electrode that includes a coating of fibroblast cells transduced by a viral vector with a BDNF gene insert. To accomplish this type of ex vivo gene transfer, Rejali et al. transduced guinea pig fibroblasts with an adenovirus with a BDNF gene cassette insert, and determined that these cells secreted BDNF and then attached BDNF-secreting cells to the cochlear implant electrode via an agarose gel, and implanted the electrode in the scala tympani. Rejali et al. determined that the BDNF expressing electrodes were able to preserve significantly more spiral ganglion neurons in the basal turns of the cochlea after 48 days of implantation when compared to control electrodes and demonstrated the feasibility of combining cochlear implant therapy with ex vivo gene transfer for enhancing spiral ganglion neuron survival. Such a system may be applied to the nucleic acid-targeting system of the present invention for delivery to the ear.

[1390] Mukherjea et al. (Antioxidants & Redox Signaling, Volume 13, Number 5, 2010) document that knockdown of NOX3 using short interfering (si) RNA abrogated cisplatin ototoxicity, as evidenced by protection of OHCs from damage and reduced threshold shifts in auditory brainstem responses (ABRs). Different doses of siNOX3 (0.3, 0.6, and 0.9 μg) were administered to rats and NOX3 expression was evaluated by real time RT-PCR. The lowest dose of NOX3 siRNA used (0.3 μg) did not show any inhibition of NOX3 mRNA when compared to transtympanic administration of scrambled siRNA or untreated cochleae. However, administration of the higher doses of NOX3 siRNA (0.6 and 0.9 μg) reduced NOX3 expression compared to control scrambled siRNA. Such a system may be applied to the CRISPR Cas system of the present invention for transtympanic administration with a dosage of about 2 mg to about 4 mg of CRISPR Cas for administration to a human.

[1391] Jung et al. (Molecular Therapy, vol. 21 no. 4, 834-841 April 2013) demonstrate that Hes5 levels in the utricle decreased after the application of siRNA and that the number of hair cells in these utricles was significantly larger than following control treatment. The data suggest that siRNA technology may be useful for inducing repair and regeneration in the inner ear and that the Notch signaling pathway is a potentially useful target for specific gene expression inhibition. Jung et al. injected 8 g of Hes5 siRNA in 2 1 volume, prepared by adding sterile normal saline to the lyophilized siRNA to a vestibular epithelium of the ear. Such a system may be applied to the nucleic acid-targeting system of the present invention for administration to the vestibular epithelium of the ear with a dosage of about 1 to about 30 mg of CRISPR Cas for administration to a human. A person with ordinary skill in the art may use the method disclosed herein in a system similar to the above described patent publications with the C2c1-CRISPR system as disclosed herein. With respect to the C2c1 protein, the CRISPR-C2c1 system may recognize a PAM sequence that is a T-rich sequence. In some embodiments, the PAM sequence is 5′ TTN 3′ or 5′ ATTN 3′, wherein N is any nucleotide. In some embodiments, the CRISPR-C2c1 system introduces one or more staggered double strand breaks (DSBs) with a 5′ overhang to the target gene. In particular embodiments, the 5′ overhang is 7 nt. In some embodiments, the CRISPR-C2c1 system introduces a template DNA sequence at the staggered DSB via HR or NHEJ. In some particular embodiments, the CRISPR-C2c1 system comprises a catalytically inactivated C2c1 protein associated with a functional domain that modifies the target gene. In a particular embodiment, the CRISPR-C2c1 system introduces a single mutation. In another particular embodiment, the CRISPR-C2c1 system introduces a single nucleotide modification to the transcript of the target gene.

### Gene Targeting in Non-Dividing Cells (Neurons & Muscle)

[1392] Non-dividing (especially non-dividing, fully differentiated) cell types present issues for gene targeting or genome engineering, for example because homologous recombination (HR) is generally suppressed in the G1 cell-cycle phase. However, while studying the mechanisms by which cells control normal DNA repair systems, Durocher discovered a previously unknown switch that keeps HR “off” in non-dividing cells and devised a strategy to toggle this switch back on. Orthwein et al. (Daniel Durocher's lab at the Mount Sinai Hospital in Ottawa, Canada) recently reported (Nature 16142, published online 9 Dec. 2015) have shown that the suppression of HR can be lifted and gene targeting successfully concluded in both kidney (293T) and osteosarcoma (U20S) cells. Tumor suppressors, BRCA1, PALB2 and BRAC2 are known to promote DNA DSB repair by HR. They found that formation of a complex of BRCA1 with PALB2—BRAC2 is governed by a ubiquitin site on PALB2, such that action on the site by an E3 ubiquitin ligase. This E3 ubiquitin ligase is composed of KEAP1 (a PALB2-interacting protein) in complex with cullin-3 (CUL3)-RBX1. PALB2 ubiquitylation suppresses its interaction with BRCA1 and is counteracted by the deubiquitylase USP11, which is itself under cell cycle control. Restoration of the BRCA1-PALB2 interaction combined with the activation of DNA-end resection is sufficient to induce homologous recombination in G1, as measured by a number of methods including a CRISPR-Cas9-based gene-targeting assay directed at USP11 or KEAP1 (expressed from a pX459 vector). However, when the BRCA1-PALB2 interaction was restored in resection-competent G1 cells using either KEAP1 depletion or expression of the PALB2-KR mutant, a robust increase in gene-targeting events was detected.

[1393] Thus, reactivation of HR in cells, especially non-dividing, fully differentiated cell types is preferred, in some embodiments. In some embodiments, promotion of the BRCA1-PALB2 interaction is preferred in some embodiments. In some embodiments, the target ell is a non-dividing cell. In some embodiments, the target cell is a neuron or muscle cell. In some embodiments, the target cell is targeted in vivo. In some embodiments, the cell is in G1 and HR is suppressed. In some embodiments, use of KEAP1 depletion, for example inhibition of expression of KEAP1 activity, is preferred. KEAP1 depletion may be achieved through siRNA, for example as shown in Orthwein et al. Alternatively, expression of the PALB2-KR mutant (lacking all eight Lys residues in the BRCA1-interaction domain is preferred, either in combination with KEAP1 depletion or alone. PALB2-KR interacts with BRCA1 irrespective of cell cycle position. Thus, promotion or restoration of the BRCA1-PALB2 interaction, especially in G1 cells, is preferred in some embodiments, especially where the target cells are non-dividing, or where removal and return (ex vivo gene targeting) is problematic, for example neuron or muscle cells. KEAP1 siRNA is available from ThermoFischer. In some embodiments, a BRCA1-PALB2 complex may be delivered to the G1 cell. In some embodiments, PALB2 deubiquitylation may be promoted for example by increased expression of the deubiquitylase USP11, so it is envisaged that a construct may be provided to promote or up-regulate expression or activity of the deubiquitylase USP11.

### Treating Diseases of the Eye

[1394] The present invention also contemplates delivering the CRISPR-Cas system to one or both eyes.

[1395] In particular embodiments of the invention, the CRISPR-Cas system may be used to correct ocular defects that arise from several genetic mutations further described in Genetic Diseases of the Eye, Second Edition, edited by Elias I. Traboulsi, Oxford University Press, 2012.

[1396] In some embodiments, the condition to be treated or targeted is an eye disorder. In some embodiments, the eye disorder may include glaucoma. In some embodiments, the eye disorder includes a retinal degenerative disease. In some embodiments, the retinal degenerative disease is selected from Stargardt disease, Bardet-Biedl Syndrome, Best disease, Blue Cone Monochromacy, Choroidermia, Cone-rod dystrophy, Congenital Stationary Night Blindness, Enhanced S-Cone Syndrome, Juvenile X-Linked Retinoschisis, Leber Congenital Amaurosis, Malattia Leventinesse, Norrie Disease or X-linked Familial Exudative Vitreoretinopathy, Pattern Dystrophy, Sorsby Dystrophy, Usher Syndrome, Retinitis Pigmentosa, Achromatopsia or Macular dystrophies or degeneration, Retinitis Pigmentosa, Achromatopsia, and age related macular degeneration. In some embodiments, the retinal degenerative disease is Leber Congenital Amaurosis (LCA) or Retinitis Pigmentosa. In some embodiments, the CRISPR system is delivered to the eye, optionally via intravitreal injection or subretinal injection.

[1397] For administration to the eye, lentiviral vectors, in particular equine infectious anemia viruses (EIAV) are particularly preferred.

[1398] In another embodiment, minimal non-primate lentiviral vectors based on the equine infectious anemia virus (EIAV) are also contemplated, especially for ocular gene therapy (see, e.g., Balagaan, J Gene Med 2006; 8: 275-285, Published online 21 Nov. 2005 in Wiley InterScience (www.interscience.wiley.com). DOI: 10.1002/jgm.845). The vectors are contemplated to have cytomegalovirus (CMV) promoter driving expression of the target gene. Intracameral, subretinal, intraocular and intravitreal injections are all contemplated (see, e.g., Balagaan, J Gene Med 2006; 8: 275-285, Published online 21 Nov. 2005 in Wiley InterScience (www.interscience.wiley.com). DOI: 10.1002/jgm.845). Intraocular injections may be performed with the aid of an operating microscope. For subretinal and intravitreal injections, eyes maybe prolapsed by gentle digital pressure and fundi visualized using a contact lens system consisting of a drop of a coupling medium solution on the cornea covered with a glass microscope slide coverslip. For subretinal injections, the tip of a 10-mm 34-gauge needle, mounted on a 5-μl Hamilton syringe may be advanced under direct visualization through the superior equatorial sclera tangentially towards the posterior pole until the aperture of the needle was visible in the subretinal space. Then, 2 1 of vector suspension may be injected to produce a superior bullous retinal detachment, thus confirming subretinal vector administration. This approach creates a self-sealing sclerotomy allowing the vector suspension to be retained in the subretinal space until it is absorbed by the RPE, usually within 48 h of the procedure. This procedure may be repeated in the inferior hemisphere to produce an inferior retinal detachment. This technique results in the exposure of approximately 70% of neurosensory retina and RPE to the vector suspension. For intravitreal injections, the needle tip may be advanced through the sclera 1 mm posterior to the corneoscleral limbus and 2 1 of vector suspension injected into the vitreous cavity. For intracameral injections, the needle tip may be advanced through a corneoscleral limbal paracentesis, directed towards the central cornea, and 2 1 of vector suspension may be injected. For intracameral injections, the needle tip may be advanced through a corneoscleral limbal paracentesis, directed towards the central cornea, and 2 1 of vector suspension may be injected. These vectors may be injected at titers of either 1.0-1.4×1010 or 1.0-1.4×10⁹ transducing units (TU)/ml.

[1399] In another embodiment, RetinoStat®, an equine infectious anemia virus-based lentiviral gene therapy vector that expresses angiostatic proteins endostain and angiostatin that is delivered via a subretinal injection for the treatment of the web form of age-related macular degeneration is also contemplated (see, e.g., Binley et al., HUMAN GENE THERAPY 23:980-991 (September 2012)). Such a vector may be modified for the CRISPR-Cas system of the present invention. Each eye may be treated with either RetinoStat® at a dose of 1.1×105 transducing units per eye (TU/eye) in a total volume of 100 μl.

[1400] In another embodiment, an E1-, partial E3-, E4-deleted adenoviral vector may be contemplated for delivery to the eye. Twenty-eight patients with advanced neovascular age-related macular degeneration (AMD) were given a single intravitreous injection of an E1-, partial E3-, E4-deleted adenoviral vector expressing human pigment ep-ithelium-derived factor (AdPEDF.ll) (see, e.g., Campochiaro et al., Human Gene Therapy 17:167-176 (February 2006)). Doses ranging from 106 to 109.5 particle units (PU) were investigated and there were no serious adverse events related to AdPEDF.ll and no dose-limiting toxicities (see, e.g., Campochiaro et al., Human Gene Therapy 17:167-176 (February 2006)). Adenoviral vectormediated ocular gene transfer appears to be a viable approach for the treatment of ocular disorders and could be applied to the CRISPR Cas system.

[1401] In another embodiment, the sd-rxRNA® system of RXi Pharmaceuticals may be used/and or adapted for delivering CRISPR Cas to the eye. In this system, a single intravitreal administration of 3 g of sd-rxRNA results in sequence-specific reduction of PPIB mRNA levels for 14 days. The sd-rxRNA® system may be applied to the nucleic acid-targeting system of the present invention, contemplating a dose of about 3 to 20 mg of CRISPR administered to a human.

[1402] Millington-Ward et al. (Molecular Therapy, vol. 19 no. 4, 642-649 April 2011) describes adeno-associated virus (AAV) vectors to deliver an RNA interference (RNAi)-based rhodopsin suppressor and a codon-modified rhodopsin replacement gene resistant to suppression due to nucleotide alterations at degenerate positions over the RNAi target site. An injection of either 6.0×108 vp or 1.8×1010 vp AAV were subretinally injected into the eyes by Millington-Ward et al. The AAV vectors of Millington-Ward et al. may be applied to the CRISPR Cas system of the present invention, contemplating a dose of about 2×1011 to about 6×1013 vp administered to a human.

[1403] Dalkara et al. (Sci Transl Med 5, 189ra76 (2013)) also relates to in vivo directed evolution to fashion an AAV vector that delivers wild-type versions of defective genes throughout the retina after noninjurious injection into the eyes' vitreous humor. Dalkara describes a 7mer peptide display library and an AAV library constructed by DNA shuffling of cap genes from AAV1, 2, 4, 5, 6, 8, and 9. The rcAAV libraries and rAAV vectors expressing GFP under a CAG or Rho promoter were packaged and deoxyribonuclease-resistant genomic titers were obtained through quantitative PCR. The libraries were pooled, and two rounds of evolution were performed, each consisting of initial library diversification followed by three in vivo selection steps. In each such step, P30 rho-GFP mice were intravitreally injected with 2 ml of iodixanol-purified, phosphate-buffered saline (PBS)-dialyzed library with a genomic titer of about 1×1012 vg/ml. The AAV vectors of Dalkara et al. may be applied to the nucleic acid-targeting system of the present invention, contemplating a dose of about 1×1015 to about 1×1016 vg/ml administered to a human.

[1404] In a particular embodiment, the rhodopsin gene may be targeted for the treatment of retinitis pigmentosa (RP), wherein the system of US Patent Publication No. 20120204282 assigned to Sangamo BioSciences, Inc. may be modified in accordance of the CRISPR Cas system of the present invention. In another embodiment, the methods of US Patent Publication No. 20130183282 assigned to Cellectis, which is directed to methods of cleaving a target sequence from the human rhodopsin gene, may also be modified to the nucleic acid-targeting system of the present invention. In another embodiment, the methods of US Publication No. 20150252358 assigned to Editas Medicine, which is directed to CRISPR-Cas related methods and compositions for treating leber's congenital amaurosis 10 (Lca10), may also be modified to the nucleic acid-targeting system for the present invention.

[1405] In another embodiment, the methods of US Patent Publication No. 20170073674 assigned to Editas Medicine, which is directed to CRISPR-Cas related methods and compositions for treating usher syndrome and retinitis pigmentosa may also be modified to the nucleic acid targeting system for the present invention.

[1406] In some embodiments, the CRISPR protein is a C2c1, and the system comprises: I. a CRISPR-Cas system RNA polynucleotide sequence, wherein the polynucleotide sequence comprises: (a) a tracr RNA polynucleotide and a guide RNA polynucleotide capable of hybridizing to a target sequence, and (b) a direct repeat RNA polynucleotide, and II. a polynucleotide sequence encoding the C2c1, optionally comprising at least one or more nuclear localization sequences, wherein the direct repeat sequence hybridizes to the guide sequence and directs sequence-specific binding of a CRISPR complex to the target sequence, and wherein the CRISPR complex comprises the CRISPR protein complexed with (1) the guide sequence that is hybridized or hybridizable to the target sequence, and (2) the direct repeat sequence, and the polynucleotide sequence encoding a CRISPR protein is DNA or RNA.

[1407] In certain embodiments, the C2c1 effector protein recognizes T-rich PAMs. In particular embodiments, the PAM is 5′-TTN-3′ or 5′-ATTN-3′. In certain embodiments, the locus of interest related to MPS I is modified by the CRISPR-C2c1 complex by creating staggered cuts with 5′ overhangs. In some embodiments, the 5′ overhang is 7 nt. In some embodiments, the staggered cuts are followed by NHEJ or HDR. In certain embodiments, the locus of interest is modified by the CRISPR-C2c1 complex by inserting, or “knocking-in” a template DNA sequence. In particular embodiments, the DNA insert is designed to integrate into the genome in the proper orientation. Maresca et al. (Genome Res. 2013 March; 23(3): 539-546) described a method of site directed, precise insertion applicable with zinc finger nucleases (ZFNs) and Tale nucleases (TALENs) wherein short, double-stranded DNAs with 5′ overhangs were ligated to complementary ends, which allowed precise insertion of 15-kb exogeneous expression cassette at defined locus in human cell lines. He et al. (Nucleic Acids Res. 2016 May 19; 44(9)) described CRISPR/Cas9-induced site-specific knock-in of a 4.6 kb promoterless ires-eGFP fragment into the GAPDH locus yielded up to 20% GFP+ cells in somatic LO2 cells, and 1.70% GFP+ cells in human embryonic stem cells mediated by the NHEJ pathway and also reported that the NHEJ-based knock-in is more efficient than HDR-mediated gene targeting in all human cell types examined. Because C2c1 generates a staggered cut with a 5′ overhang, one with ordinary skill in the art could use the methods similar to that as described in Meresca et al. and He et al. to generate exogenous DNA insertions at a locus of interest with the CRISPR-C2c1 system disclosed herein.

[1408] In certain embodiments, the locus of interest is first modified by the CRISPR-C2c1 system at the distal end of the PAM sequence, and further modified by the CRISPR-C2c1 system near the PAM sequence and repaired via HDR. In certain embodiments, the locus of interest is modified by the CRISPR-C2c1 system by introducing a mutation, deletion, or insertion of exogenous DNA sequence via HDR. In some embodiments, the locus of interest is modified by the CRISPR-C2c1 system by introducing a mutation, deletion, or insertion of exogenous DNA sequence via NHEJ. In preferred embodiments, the exogenous DNA is flanked by single guide DNA (sgDNA)-PAM sequences on both 3′ and 5′ ends. In preferred embodiments, the exogenous DNA is released after CRISPR-C2c1 cleavage.

[1409] Wu (Cell Stem Cell, 13:659-62, 2013) designed a guide RNA that led Cas9 to a single base pair mutation that causes cataracts in mice, where it induced DNA cleavage. Then using either the other wild-type allele or oligos given to the zygotes repair mechanisms corrected the sequence of the broken allele and corrected the cataract-causing genetic defect in mutant mouse.

[1410] US Patent Publication No. 20120159653, describes use of zinc finger nucleases to genetically modify cells, animals and proteins associated with macular degredation (MD). Macular degeneration (MD) is the primary cause of visual impairment in the elderly, but is also a hallmark symptom of childhood diseases such as Stargardt disease, Sorsby fundus, and fatal childhood neurodegenerative diseases, with an age of onset as young as infancy. Macular degeneration results in a loss of vision in the center of the visual field (the macula) because of damage to the retina. Currently existing animal models do not recapitulate major hallmarks of the disease as it is observed in humans. The available animal models comprising mutant genes encoding proteins associated with MD also produce highly variable phenotypes, making translations to human disease and therapy development problematic.

[1411] One aspect of US Patent Publication No. 20120159653 relates to editing of any chromosomal sequences that encode proteins associated with MD which may be applied to the nucleic acid-targeting system of the present invention. The proteins associated with MD are typically selected based on an experimental association of the protein associated with MD to an MD disorder. For example, the production rate or circulating concentration of a protein associated with MD may be elevated or depressed in a population having an MD disorder relative to a population lacking the MD disorder. Differences in protein levels may be assessed using proteomic techniques including but not limited to Western blot, immunohistochemical staining, enzyme linked immunosorbent assay (ELISA), and mass spectrometry. Alternatively, the proteins associated with MD may be identified by obtaining gene expression profiles of the genes encoding the proteins using genomic techniques including but not limited to DNA microarray analysis, serial analysis of gene expression (SAGE), and quantitative real-time polymerase chain reaction (Q-PCR).

[1412] By way of non-limiting example, proteins associated with MD include but are not limited to the following proteins: (ABCA4) ATP-binding cassette, sub-family A (ABC1), member 4 ACHM1 achromatopsia (rod monochromacy) 1 ApoE Apolipoprotein E (ApoE) C1QTNF5 (CTRP5) Clq and tumor necrosis factor related protein 5 (C1QTNF5) C2 Complement component 2 (C2) C3 Complement components (C3) CCL2 Chemokine (C-C motif) Ligand 2 (CCL2) CCR2 Chemokine (C-C motif) receptor 2 (CCR2) CD36 Cluster of Differentiation 36 CFB Complement factor B CFH Complement factor CFH H CFHR1 complement factor H-related 1 CFHR3 complement factor H-related 3 CNGB3 cyclic nucleotide gated channel beta 3 CP ceruloplasmin (CP) CRP C reactive protein (CRP) CST3 cystatin C or cystatin 3 (CST3) CTSD Cathepsin D (CTSD) CX3CR1 chemokine (C-X3-C motif) receptor 1 ELOVL4 Elongation of very long chain fatty acids 4 ERCC6 excision repair crosscomplementing rodent repair deficiency, complementation group 6 FBLN5 Fibulin-5 FBLN5 Fibulin 5 FBLN6 Fibulin 6 FSCN2 fascin (FSCN2) HMCN1 Hemicentrin 1 HMCN1 hemicentin 1 HTRA1 HtrA serine peptidase 1 (HTRA1) HTRA1 HtrA serine peptidase 1 IL-6 Interleukin 6 IL-8 Interleukin 8 LOC387715 Hypothetical protein PLEKHA1 Pleckstrin homology domain containing family A member 1 (PLEKHA1) PROM1 Prominin 1(PROM1 or CD133) PRPH2 Peripherin-2 RPGR retinitis pigmentosa GTPase regulator SERPINGI serpin peptidase inhibitor, clade G, member 1 (C1-inhibitor) TCOF1 Treacle TIMP3 Metalloproteinase inhibitor 3 (TIMP3) TLR3 Toll-like receptor 3.

[1413] The identity of the protein associated with MD whose chromosomal sequence is edited can and will vary. In preferred embodiments, the proteins associated with MD whose chromosomal sequence is edited may be the ATP-binding cassette, sub-family A (ABC1) member 4 protein (ABCA4) encoded by the ABCR gene, the apolipoprotein E protein (APOE) encoded by the APOE gene, the chemokine (C-C motif) Ligand 2 protein (CCL2) encoded by the CCL2 gene, the chemokine (C-C motif) receptor 2 protein (CCR2) encoded by the CCR2 gene, the ceruloplasmin protein (CP) encoded by the CP gene, the cathepsin D protein (CTSD) encoded by the CTSD gene, or the metalloproteinase inhibitor 3 protein (TIMP3) encoded by the TIMP3 gene. In an exemplary embodiment, the genetically modified animal is a rat, and the edited chromosomal sequence encoding the protein associated with MD may be: (ABCA4) ATPbinding cassette, NM_000350 sub-family A (ABC1), member 4 APOE Apolipoprotein E NM_138828 (APOE) CCL2 Chemokine (C-C NM_031530 motif) Ligand 2 (CCL2) CCR2 Chemokine (C-C NM_021866 motif) receptor 2 (CCR2) CP ceruloplasmin (CP) NM_012532 CTSD Cathepsin D (CTSD) NM_134334 TIMP3 Metalloproteinase NM_012886 inhibitor 3 (TIMP3) The animal or cell may comprise 1, 2, 3, 4, 5, 6, 7 or more disrupted chromosomal sequences encoding a protein associated with MD and zero, 1, 2, 3, 4, 5, 6, 7 or more chromosomally integrated sequences encoding the disrupted protein associated with MD.

[1414] The edited or integrated chromosomal sequence may be modified to encode an altered protein associated with MD. Several mutations in MD-related chromosomal sequences have been associated with MD. Non-limiting examples of mutations in chromosomal sequences associated with MD include those that may cause MD including in the ABCR protein, E471K (i.e. glutamate at position 471 is changed to lysine), R1129L (i.e. arginine at position 1129 is changed to leucine), T1428M (i.e. threonine at position 1428 is changed to methionine), R1517S (i.e. arginine at position 1517 is changed to serine), I1562T (i.e. isoleucine at position 1562 is changed to threonine), and G1578R (i.e. glycine at position 1578 is changed to arginine); in the CCR2 protein, V64I (i.e. valine at position 192 is changed to isoleucine); in CP protein, G969B (i.e. glycine at position 969 is changed to asparagine or aspartate); in TIMP3 protein, S156C (i.e. serine at position 156 is changed to cysteine), G166C (i.e. glycine at position 166 is changed to cysteine), G167C (i.e. glycine at position 167 is changed to cysteine), Y168C (i.e. tyrosine at position 168 is changed to cysteine), S170C (i.e. serine at position 170 is changed to cysteine), Y172C (i.e. tyrosine at position 172 is changed to cysteine) and S181C (i.e. serine at position 181 is changed to cysteine). Other associations of genetic variants in MD-associated genes and disease are known in the art.

[1415] CRISPR systems are useful to correct diseases resulting from autosomal dominant genes. For example, CRISPR/Cas9 was used to remove an autosomal dominant gene that causes receptor loss in the eye. Bakondi, B. et al., In Vivo CRISPR/Cas9 Gene Editing Corrects Retinal Dystrophy in the S334ter-3 Rat Model of Autosomal Dominant Retinitis Pigmentosa. Molecular Therapy, 2015; DOI. 10.1038/mt.2015.220.

[1416] A person with ordinary skill in the art may use the method disclosed herein in a system similar as above described with the C2c1-CRISPR system as disclosed herein. With respect to the C2c1 protein, the CRISPR-C2c1 system may recognize a PAM sequence that is a T-rich sequence. In some embodiments, the PAM sequence is 5′ TTN 3′ or 5′ ATTN 3′, wherein N is any nucleotide. In some embodiments, the CRISPR-C2c1 system introduces one or more staggered double strand breaks (DSBs) with a 5′ overhang to the target gene. In particular embodiments, the 5′ overhang is 7 nt. In some embodiments, the CRISPR-C2c1 system introduces a template DNA sequence at the staggered DSB via HR or NHEJ. In some particular embodiments, the CRISPR-C2c1 system comprises a catalytically inactivated C2c1 protein associated with a functional domain that modifies the target gene. In a particular embodiment, the CRISPR-C2c1 system introduces a single mutation. In another particular embodiment, the CRISPR-C2c1 system introduces a single nucleotide modification to the transcript of the target gene.

[1417] Treating Circulatory and Muscular Diseases

[1418] The present invention also contemplates delivering the CRISPR-Cas system described herein, e.g. C2c1 effector protein systems, to the heart. For the heart, a myocardium tropic adeno-associated virus (AAVM) is preferred, in particular AAVM41 which showed preferential gene transfer in the heart (see, e.g., Lin-Yanga et al., PNAS, Mar. 10, 2009, vol. 106, no. 10). Administration may be systemic or local. A dosage of about 1-10×1014 vector genomes are contemplated for systemic administration. See also, e.g., Eulalio et al. (2012) Nature 492: 376 and Somasuntharam et al. (2013) Biomaterials 34: 7790.

[1419] For example, US Patent Publication No. 20110023139, describes use of zinc finger nucleases to genetically modify cells, animals and proteins associated with cardiovascular disease. Cardiovascular diseases generally include high blood pressure, heart attacks, heart failure, and stroke and TIA. Any chromosomal sequence involved in cardiovascular disease or the protein encoded by any chromosomal sequence involved in cardiovascular disease may be utilized in the methods described in this disclosure. The cardiovascular-related proteins are typically selected based on an experimental association of the cardiovascular-related protein to the development of cardiovascular disease. For example, the production rate or circulating concentration of a cardiovascular-related protein may be elevated or depressed in a population having a cardiovascular disorder relative to a population lacking the cardiovascular disorder. Differences in protein levels may be assessed using proteomic techniques including but not limited to Western blot, immunohistochemical staining, enzyme linked immunosorbent assay (ELISA), and mass spectrometry. Alternatively, the cardiovascular-related proteins may be identified by obtaining gene expression profiles of the genes encoding the proteins using genomic techniques including but not limited to DNA microarray analysis, serial analysis of gene expression (SAGE), and quantitative real-time polymerase chain reaction (Q-PCR).

[1420] By way of example, the chromosomal sequence may comprise, but is not limited to, IL1B (interleukin 1, beta), XDH (xanthine dehydrogenase), TP53 (tumor protein p53), PTGIS (prostaglandin 12 (prostacyclin) synthase), MB (myoglobin), IL4 (interleukin 4), ANGPT1 (angiopoietin 1), ABCG8 (ATP-binding cassette, sub-family G (WHITE), member 8), CTSK (cathepsin K), PTGIR (prostaglandin 12 (prostacyclin) receptor (IP)), KCNJ11 (potassium inwardly-rectifying channel, subfamily J, member 11), INS (insulin), CRP (C-reactive protein, pentraxin-related), PDGFRB (platelet-derived growth factor receptor, beta polypeptide), CCNA2 (cyclin A2), PDGFB (platelet-derived growth factor beta polypeptide (simian sarcoma viral (v-sis) oncogene homolog)), KCNJ5 (potassium inwardly-rectifying channel, subfamily J, member 5), KCNN3 (potassium intermediate/small conductance calcium-activated channel, subfamily N, member 3), CAPN10 (calpain 10), PTGES (prostaglandin E synthase), ADRA2B (adrenergic, alpha-2B-, receptor), ABCG5 (ATP-binding cassette, sub-family G (WHITE), member 5), PRDX2 (peroxiredoxin 2), CAPN5 (calpain 5), PARP14 (poly (ADP-ribose) polymerase family, member 14), MEX3C (mex-3 homolog C (C. elegans)), ACE angiotensin I converting enzyme (peptidyl-dipeptidase A) 1), TNF (tumor necrosis factor (TNF superfamily, member 2)), IL6 (interleukin 6 (interferon, beta 2)), STN (statin), SERPINE1 (serpin peptidase inhibitor, clade E (nexin, plasminogen activator inhibitor type 1), member 1), ALB (albumin), ADIPOQ (adiponectin, C1Q and collagen domain containing), APOB (apolipoprotein B (including Ag(x) antigen)), APOE (apolipoprotein E), LEP (leptin), MTHFR (5,10-methylenetetrahydrofolate reductase (NADPH)), APOA1 (apolipoprotein A-I), EDN1 (endothelin 1), NPPB (natriuretic peptide precursor B), NOS3 (nitric oxide synthase 3 (endothelial cell)), PPARG (peroxisome proliferator-activated receptor gamma), PLAT (plasminogen activator, tissue), PTGS2 (prostaglandin-endoperoxide synthase 2 (prostaglandin G/H synthase and cyclooxygenase)), CETP (cholesteryl ester transfer protein, plasma), AGTR1 (angiotensin II receptor, type 1), HMGCR (3-hydroxy-3-methylglutaryl-Coenzyme A reductase), IGF1 (insulin-like growth factor 1 (somatomedin C)), SELE (selectin E), REN (renin), PPARA (peroxisome proliferator-activated receptor alpha), PON1 (paraoxonase 1), KNG1 (kininogen 1), CCL2 (chemokine (C-C motif) ligand 2), LPL (lipoprotein lipase), VWF (von Willebrand factor), F2 (coagulation factor II (thrombin)), ICAM1 (intercellular adhesion molecule 1), TGFB1 (transforming growth factor, beta 1), NPPA (natriuretic peptide precursor A), IL10 (interleukin 10), EPO (erythropoietin), SOD1 (superoxide dismutase 1, soluble), VCAM1 (vascular cell adhesion molecule 1), IFNG (interferon, gamma), LPA (lipoprotein, Lp(a)), MPO (myeloperoxidase), ESR1 (estrogen receptor 1), MAPK1 (mitogen-activated protein kinase 1), HP (haptoglobin), F3 (coagulation factor III (thromboplastin, tissue factor)), CST3 (cystatin C), COG2 (component of oligomeric golgi complex 2), MMP9 (matrix metallopeptidase 9 (gelatinase B, 92 kDa gelatinase, 92 kDa type IV collagenase)), SERPINC1 (serpin peptidase inhibitor, clade C (antithrombin), member 1), F8 (coagulation factor VIII, procoagulant component), HMOX1 (heme oxygenase (decycling) 1), APOC3 (apolipoprotein C-III), IL8 (interleukin 8), PROK1 (prokineticin 1), CBS (cystathionine-beta-synthase), NOS2 (nitric oxide synthase 2, inducible), TLR4 (toll-like receptor 4), SELP (selectin P (granule membrane protein 140 kDa, antigen CD62)), ABCA1 (ATP-binding cassette, sub-family A (ABC1), member 1), AGT (angiotensinogen (serpin peptidase inhibitor, clade A, member 8)), LDLR (low density lipoprotein receptor), GPT (glutamic-pyruvate transaminase (alanine aminotransferase)), VEGFA (vascular endothelial growth factor A), NR3C2 (nuclear receptor subfamily 3, group C, member 2), IL18 (interleukin 18 (interferon-gamma-inducing factor)), NOS1 (nitric oxide synthase 1 (neuronal)), NR3C1 (nuclear receptor subfamily 3, group C, member 1 (glucocorticoid receptor)), FGB (fibrinogen beta chain), HGF (hepatocyte growth factor (hepapoietin A; scatter factor)), ILlA (interleukin 1, alpha), RETN (resistin), AKT1 (v-akt murine thymoma viral oncogene homolog 1), LIPC (lipase, hepatic), HSPD1 (heat shock 60 kDa protein 1 (chaperonin)), MAPK14 (mitogen-activated protein kinase 14), SPP1 (secreted phosphoprotein 1), ITGB3 (integrin, beta 3 (platelet glycoprotein 111a, antigen CD61)), CAT (catalase), UTS2 (urotensin 2), THBD (thrombomodulin), F10 (coagulation factor X), CP (ceruloplasmin (ferroxidase)), TNFRSF11B (tumor necrosis factor receptor superfamily, member 11b), EDNRA (endothelin receptor type A), EGFR (epidermal growth factor receptor (erythroblastic leukemia viral (v-erb-b) oncogene homolog, avian)), MMP2 (matrix metallopeptidase 2 (gelatinase A, 72 kDa gelatinase, 72 kDa type IV collagenase)), PLG (plasminogen), NPY (neuropeptide Y), RHOD (ras homolog gene family, member D), MAPK8 (mitogen-activated protein kinase 8), MYC (v-myc myelocytomatosis viral oncogene homolog (avian)), FN1 (fibronectin 1), CMA1 (chymase 1, mast cell), PLAU (plasminogen activator, urokinase), GNB3 (guanine nucleotide binding protein (G protein), beta polypeptide 3), ADRB2 (adrenergic, beta-2-, receptor, surface), APOA5 (apolipoprotein A-V), SOD2 (superoxide dismutase 2, mitochondrial), F5 (coagulation factor V (proaccelerin, labile factor)), VDR (vitamin D (1,25-dihydroxyvitamin D3) receptor), ALOX5 (arachidonate 5-lipoxygenase), HLA-DRB1 (major histocompatibility complex, class II, DR beta 1), PARP1 (poly (ADP-ribose) polymerase 1), CD40LG (CD40 ligand), PON2 (paraoxonase 2), AGER (advanced glycosylation end product-specific receptor), IRS1 (insulin receptor substrate 1), PTGS1 (prostaglandin-endoperoxide synthase 1 (prostaglandin G/H synthase and cyclooxygenase)), ECE1 (endothelin converting enzyme 1), F7 (coagulation factor VII (serum prothrombin conversion accelerator)), URN (interleukin 1 receptor antagonist), EPHX2 (epoxide hydrolase 2, cytoplasmic), IGFBP1 (insulin-like growth factor binding protein 1), MAPK10 (mitogen-activated protein kinase 10), FAS (Fas (TNF receptor superfamily, member 6)), ABCB1 (ATP-binding cassette, sub-family B (MDR/TAP), member 1), JUN (jun oncogene), IGFBP3 (insulin-like growth factor binding protein 3), CD14 (CD14 molecule), PDE5A (phosphodiesterase 5A, cGMP-specific), AGTR2 (angiotensin II receptor, type 2), CD40 (CD40 molecule, TNF receptor superfamily member 5), LCAT (lecithin-cholesterol acyltransferase), CCR5 (chemokine (C-C motif) receptor 5), MMP1 (matrix metallopeptidase 1 (interstitial collagenase)), TIMP1 (TIMP metallopeptidase inhibitor 1), ADM (adrenomedullin), DYT10 (dystonia 10), STAT3 (signal transducer and activator of transcription 3 (acute-phase response factor)), MMP3 (matrix metallopeptidase 3 (stromelysin 1, progelatinase)), ELN (elastin), USF1 (upstream transcription factor 1), CFH (complement factor H), HSPA4 (heat shock 70 kDa protein 4), MMP12 (matrix metallopeptidase 12 (macrophage elastase)), MME (membrane metallo-endopeptidase), F2R (coagulation factor II (thrombin) receptor), SELL (selectin L), CTSB (cathepsin B), ANXA5 (annexin A5), ADRB1 (adrenergic, beta-1-, receptor), CYBA (cytochrome b-245, alpha polypeptide), FGA (fibrinogen alpha chain), GGT1 (gamma-glutamyltransferase 1), LIPG (lipase, endothelial), HIF1A (hypoxia inducible factor 1, alpha subunit (basic helix-loop-helix transcription factor)), CXCR4 (chemokine (C-X-C motif) receptor 4), PROC (protein C (inactivator of coagulation factors Va and VIIIa)), SCARB1 (scavenger receptor class B, member 1), CD79A (CD79a molecule, immunoglobulin-associated alpha), PLTP (phospholipid transfer protein), ADD1 (adducin 1 (alpha)), FGG (fibrinogen gamma chain), SAA1 (serum amyloid A1), KCNH2 (potassium voltage-gated channel, subfamily H (eag-related), member 2), DPP4 (dipeptidyl-peptidase 4), G6PD (glucose-6-phosphate dehydrogenase), NPR1 (natriuretic peptide receptor A/guanylate cyclase A (atrionatriuretic peptide receptor A)), VTN (vitronectin), KIAA0101 (KIAA0101), FOS (FBJ murine osteosarcoma viral oncogene homolog), TLR2 (toll-like receptor 2), PPIG (peptidylprolyl isomerase G (cyclophilin G)), IL1R1 (interleukin 1 receptor, type I), AR (androgen receptor), CYP1A1 (cytochrome P450, family 1, subfamily A, polypeptide 1), SERPINA1 (serpin peptidase inhibitor, clade A (alpha-1 antiproteinase, antitrypsin), member 1), MTR (5-methyltetrahydrofolate-homocysteine methyltransferase), RBP4 (retinol binding protein 4, plasma), APOA4 (apolipoprotein A-IV), CDKN2A (cyclin-dependent kinase inhibitor 2A (melanoma, p16, inhibits CDK4)), FGF2 (fibroblast growth factor 2 (basic)), EDNRB (endothelin receptor type B), ITGA2 (integrin, alpha 2 (CD49B, alpha 2 subunit of VLA-2 receptor)), CABINI (calcineurin binding protein 1), SHBG (sex hormone-binding globulin), HMGB1 (high-mobility group box 1), HSP90B2P (heat shock protein 90 kDa beta (Grp94), member 2 (pseudogene)), CYP3A4 (cytochrome P450, family 3, subfamily A, polypeptide 4), GJA1 (gap junction protein, alpha 1, 43 kDa), CAV1 (caveolin 1, caveolae protein, 22 kDa), ESR2 (estrogen receptor 2 (ER beta)), LTA (lymphotoxin alpha (TNF superfamily, member 1)), GDF15 (growth differentiation factor 15), BDNF (brain-derived neurotrophic factor), CYP2D6 (cytochrome P450, family 2, subfamily D, polypeptide 6), NGF (nerve growth factor (beta polypeptide)), SP1 (Sp transcription factor), TGIF1 (TGFB-induced factor homeobox 1), SRC (v-src sarcoma (Schmidt-Ruppin A-2) viral oncogene homolog (avian)), EGF (epidermal growth factor (beta-urogastrone)), PIK3CG (phosphoinositide-3-kinase, catalytic, gamma polypeptide), HLA-A (major histocompatibility complex, class I, A), KCNQ1 (potassium voltage-gated channel, KQT-like subfamily, member 1), CNR1 (cannabinoid receptor 1 (brain)), FBN1 (fibrillin 1), CHKA (choline kinase alpha), BEST1 (bestrophin 1), APP (amyloid beta (A4) precursor protein), CTNNB1 (catenin (cadherin-associated protein), beta 1, 88 kDa), IL2 (interleukin 2), CD36 (CD36 molecule (thrombospondin receptor)), PRKAB1 (protein kinase, AMP-activated, beta 1 non-catalytic subunit), TPO (thyroid peroxidase), ALDH7A1 (aldehyde dehydrogenase 7 family, member A1), CX3CR1 (chemokine (C-X3-C motif) receptor 1), TH (tyrosine hydroxylase), F9 (coagulation factor IX), GH1 (growth hormone 1), TF (transferrin), HFE (hemochromatosis), IL17A (interleukin 17A), PTEN (phosphatase and tensin homolog), GSTM1 (glutathione S-transferase mu 1), DMD (dystrophin), GATA4 (GATA binding protein 4), F13A1 (coagulation factor XIII, A1 polypeptide), TTR (transthyretin), FABP4 (fatty acid binding protein 4, adipocyte), PON3 (paraoxonase 3), APOC1 (apolipoprotein C-I), INSR (insulin receptor), TNFRSF1B (tumor necrosis factor receptor superfamily, member 1), HTR2A (5-hydroxytryptamine (serotonin) receptor 2A), CSF3 (colony stimulating factor 3 (granulocyte)), CYP2C9 (cytochrome P450, family 2, subfamily C, polypeptide 9), TXN (thioredoxin), CYP11B2 (cytochrome P450, family 11, subfamily B, polypeptide 2), PTH (parathyroid hormone), CSF2 (colony stimulating factor 2 (granulocyte-macrophage)), KDR (kinase insert domain receptor (a type III receptor tyrosine kinase)), PLA2G2A (phospholipase A2, group IIA (platelets, synovial fluid)), B2M (beta-2-microglobulin), THBS1 (thrombospondin 1), GCG (glucagon), RHOA (ras homolog gene family, member A), ALDH2 (aldehyde dehydrogenase 2 family (mitochondrial)), TCF7L2 (transcription factor 7-like 2 (T-cell specific, HMG-box)), BDKRB2 (bradykinin receptor B2), NFE2L2 (nuclear factor (erythroid-derived 2)-like 2), NOTCHI (Notch homolog 1, translocation-associated (Drosophila)), UGT1A1 (UDP glucuronosyltransferase 1 family, polypeptide A1), IFNA1 (interferon, alpha 1), PPARD (peroxisome proliferator-activated receptor delta), SIRT1 (sirtuin (silent mating type information regulation 2 homolog) 1 (S. cerevisiae)), GNRH1 (gonadotropin-releasing hormone 1 (luteinizing-releasing hormone)), PAPPA (pregnancy-associated plasma protein A, pappalysin 1), ARR3 (arrestin 3, retinal (X-arrestin)), NPPC (natriuretic peptide precursor C), AHSP (alpha hemoglobin stabilizing protein), PTK2 (PTK2 protein tyrosine kinase 2), IL13 (interleukin 13), MTOR (mechanistic target of rapamycin (serine/threonine kinase)), ITGB2 (integrin, beta 2 (complement component 3 receptor 3 and 4 subunit)), GSTT1 (glutathione S-transferase theta 1), IL6ST (interleukin 6 signal transducer (gp130, oncostatin M receptor)), CPB2 (carboxypeptidase B2 (plasma)), CYP1A2 (cytochrome P450, family 1, subfamily A, polypeptide 2), HNF4A (hepatocyte nuclear factor 4, alpha), SLC6A4 (solute carrier family 6 (neurotransmitter transporter, serotonin), member 4), PLA2G6 (phospholipase A2, group VI (cytosolic, calcium-independent)), TNFSF11 (tumor necrosis factor (ligand) superfamily, member 11), SLC8A1 (solute carrier family 8 (sodium/calcium exchanger), member 1), F2RL1 (coagulation factor II (thrombin) receptor-like 1), AKR1A1 (aldo-keto reductase family 1, member A1 (aldehyde reductase)), ALDH9A1 (aldehyde dehydrogenase 9 family, member A1), BGLAP (bone gamma-carboxyglutamate (gla) protein), MTTP (microsomal triglyceride transfer protein), MTRR (5-methyltetrahydrofolate-homocysteine methyltransferase reductase), SULT1A3 (sulfotransferase family, cytosolic, 1A, phenol-preferring, member 3), RAGE (renal tumor antigen), C4B (complement component 4B (Chido blood group), P2RY12 (purinergic receptor P2Y, G-protein coupled, 12), RNLS (renalase, FAD-dependent amine oxidase), CREB1 (cAMP responsive element binding protein 1), POMC (proopiomelanocortin), RAC1 (ras-related C3 botulinum toxin substrate 1 (rho family, small GTP binding protein Rac1)), LMNA (lamin NC), CD59 (CD59 molecule, complement regulatory protein), SCN5A (sodium channel, voltage-gated, type V, alpha subunit), CYP1B1 (cytochrome P450, family 1, subfamily B, polypeptide 1), MIF (macrophage migration inhibitory factor (glycosylation-inhibiting factor)), MMP13 (matrix metallopeptidase 13 (collagenase 3)), TIMP2 (TIMP metallopeptidase inhibitor 2), CYP19A1 (cytochrome P450, family 19, subfamily A, polypeptide 1), CYP21A2 (cytochrome P450, family 21, subfamily A, polypeptide 2), PTPN22 (protein tyrosine phosphatase, non-receptor type 22 (lymphoid)), MYH14 (myosin, heavy chain 14, non-muscle), MBL2 (mannose-binding lectin (protein C) 2, soluble (opsonic defect)), SELPLG (selectin P ligand), AOC3 (amine oxidase, copper containing 3 (vascular adhesion protein 1)), CTSL1 (cathepsin L1), PCNA (proliferating cell nuclear antigen), IGF2 (insulin-like growth factor 2 (somatomedin A)), ITGB1 (integrin, beta 1 (fibronectin receptor, beta polypeptide, antigen CD29 includes MDF2, MSK12)), CAST (calpastatin), CXCL12 (chemokine (C-X-C motif) ligand 12 (stromal cell-derived factor 1)), IGHE (immunoglobulin heavy constant epsilon), KCNE1 (potassium voltage-gated channel, Isk-related family, member 1), TFRC (transferrin receptor (p90, CD71)), COL1A1 (collagen, type I, alpha 1), COL1A2 (collagen, type I, alpha 2), IL2RB (interleukin 2 receptor, beta), PLA2G10 (phospholipase A2, group X), ANGPT2 (angiopoietin 2), PROCR (protein C receptor, endothelial (EPCR)), NOX4 (NADPH oxidase 4), HAMP (hepcidin antimicrobial peptide), PTPN11 (protein tyrosine phosphatase, non-receptor type 11), SLC2A1 (solute carrier family 2 (facilitated glucose transporter), member 1), IL2RA (interleukin 2 receptor, alpha), CCL5 (chemokine (C-C motif) ligand 5), IRF1 (interferon regulatory factor 1), CFLAR (CASP8 and FADD-like apoptosis regulator), CALCA (calcitonin-related polypeptide alpha), EIF4E (eukaryotic translation initiation factor 4E), GSTP1 (glutathione S-transferase pi 1), JAK2 (Janus kinase 2), CYP3A5 (cytochrome P450, family 3, subfamily A, polypeptide 5), HSPG2 (heparan sulfate proteoglycan 2), CCL3 (chemokine (C-C motif) ligand 3), MYD88 (myeloid differentiation primary response gene (88)), VIP (vasoactive intestinal peptide), SOAT1 (sterol O-acyltransferase 1), ADRBK1 (adrenergic, beta, receptor kinase 1), NR4A2 (nuclear receptor subfamily 4, group A, member 2), MMP8 (matrix metallopeptidase 8 (neutrophil collagenase)), NPR2 (natriuretic peptide receptor B/guanylate cyclase B (atrionatriuretic peptide receptor B)), GCH1 (GTP cyclohydrolase 1), EPRS (glutamyl-prolyl-tRNA synthetase), PPARGC1A (peroxisome proliferator-activated receptor gamma, coactivator 1 alpha), F12 (coagulation factor XII (Hageman factor)), PECAM1 (platelet/endothelial cell adhesion molecule), CCL4 (chemokine (C-C motif) ligand 4), SERPINA3 (serpin peptidase inhibitor, clade A (alpha-1 antiproteinase, antitrypsin), member 3), CASR (calcium-sensing receptor), GJA5 (gap junction protein, alpha 5, 40 kDa), FABP2 (fatty acid binding protein 2, intestinal), TTF2 (transcription termination factor, RNA polymerase II), PROS1 (protein S (alpha)), CTF1 (cardiotrophin 1), SGCB (sarcoglycan, beta (43 kDa dystrophin-associated glycoprotein)), YME1L1 (YME1-like 1 (S. cerevisiae)), CAMP (cathelicidin antimicrobial peptide), ZC3H12A (zinc finger CCCH-type containing 12A), AKR1B1 (aldo-keto reductase family 1, member B1 (aldose reductase)), DES (desmin), MMP7 (matrix metallopeptidase 7 (matrilysin, uterine)), AHR (aryl hydrocarbon receptor), CSF1 (colony stimulating factor 1 (macrophage)), HDAC9 (histone deacetylase 9), CTGF (connective tissue growth factor), KCNMA1 (potassium large conductance calcium-activated channel, subfamily M, alpha member 1), UGT1A (UDP glucuronosyltransferase 1 family, polypeptide A complex locus), PRKCA (protein kinase C, alpha), COMT (catechol-.beta.-methyltransferase), S100B (S100 calcium binding protein B), EGR1 (early growth response 1), PRL (prolactin), IL15 (interleukin 15), DRD4 (dopamine receptor D4), CAMK2G (calcium/calmodulin-dependent protein kinase II gamma), SLC22A2 (solute carrier family 22 (organic cation transporter), member 2), CCL11 (chemokine (C-C motif) ligand 11), PGF (B321 placental growth factor), THPO (thrombopoietin), GP6 (glycoprotein VI (platelet)), TACR1 (tachykinin receptor 1), NTS (neurotensin), HNF1A (HNF1 homeobox A), SST (somatostatin), KCND1 (potassium voltage-gated channel, Shal-related subfamily, member 1), LOC646627 (phospholipase inhibitor), TBXAS1 (thromboxane A synthase 1 (platelet)), CYP2J2 (cytochrome P450, family 2, subfamily J, polypeptide 2), TBXA2R (thromboxane A2 receptor), ADH1C (alcohol dehydrogenase 1C (class I), gamma polypeptide), ALOX12 (arachidonate 12-lipoxygenase), AHSG (alpha-2-HS-glycoprotein), BHMT (betaine-homocysteine methyltransferase), GJA4 (gap junction protein, alpha 4, 37 kDa), SLC25A4 (solute carrier family 25 (mitochondrial carrier; adenine nucleotide translocator), member 4), ACLY (ATP citrate lyase), ALOX5AP (arachidonate 5-lipoxygenase-activating protein), NUMA1 (nuclear mitotic apparatus protein 1), CYP27B1 (cytochrome P450, family 27, subfamily B, polypeptide 1), CYSLTR2 (cysteinyl leukotriene receptor 2), SOD3 (superoxide dismutase 3, extracellular), LTC4S (leukotriene C4 synthase), UCN (urocortin), GHRL (ghrelin/obestatin prepropeptide), APOC2 (apolipoprotein C-II), CLEC4A (C-type lectin domain family 4, member A), KBTBD10 (kelch repeat and BTB (POZ) domain containing 10), TNC (tenascin C), TYMS (thymidylate synthetase), SHCI (SHC (Src homology 2 domain containing) transforming protein 1), LRP1 (low density lipoprotein receptor-related protein 1), SOCS3 (suppressor of cytokine signaling 3), ADH1B (alcohol dehydrogenase 1B (class I), beta polypeptide), KLK3 (kallikrein-related peptidase 3), HSD11B1 (hydroxysteroid (11-beta) dehydrogenase 1), VKORC1 (vitamin K epoxide reductase complex, subunit 1), SERPINB2 (serpin peptidase inhibitor, clade B (ovalbumin), member 2), TNS1 (tensin 1), RNF19A (ring finger protein 19A), EPOR (erythropoietin receptor), ITGAM (integrin, alpha M (complement component 3 receptor 3 subunit)), PITX2 (paired-like homeodomain 2), MAPK7 (mitogen-activated protein kinase 7), FCGR3A (Fc fragment of IgG, low affinity 111a, receptor (CD16a)), LEPR (leptin receptor), ENG (endoglin), GPX1 (glutathione peroxidase 1), GOT2 (glutamic-oxaloacetic transaminase 2, mitochondrial (aspartate aminotransferase 2)), HRH1 (histamine receptor H1), NR112 (nuclear receptor subfamily 1, group I, member 2), CRH (corticotropin releasing hormone), HTR1A (5-hydroxytryptamine (serotonin) receptor 1A), VDAC1 (voltage-dependent anion channel 1), HPSE (heparanase), SFTPD (surfactant protein D), TAP2 (transporter 2, ATP-binding cassette, sub-family B (MDR/TAP)), RNF123 (ring finger protein 123), PTK2B (PTK2B protein tyrosine kinase 2 beta), NTRK2 (neurotrophic tyrosine kinase, receptor, type 2), IL6R (interleukin 6 receptor), ACHE (acetylcholinesterase (Yt blood group)), GLP1R (glucagon-like peptide 1 receptor), GHR (growth hormone receptor), GSR (glutathione reductase), NQO1 (NAD(P)H dehydrogenase, quinone 1), NR5A1 (nuclear receptor subfamily 5, group A, member 1), GJB2 (gap junction protein, beta 2, 26 kDa), SLC9A1 (solute carrier family 9 (sodium/hydrogen exchanger), member 1), MAOA (monoamine oxidase A), PCSK9 (proprotein convertase subtilisin/kexin type 9), FCGR2A (Fc fragment of IgG, low affinity IIa, receptor (CD32)), SERPINF1 (serpin peptidase inhibitor, clade F (alpha-2 antiplasmin, pigment epithelium derived factor), member 1), EDN3 (endothelin 3), DHFR (dihydrofolate reductase), GAS6 (growth arrest-specific 6), SMPD1 (sphingomyelin phosphodiesterase 1, acid lysosomal), UCP2 (uncoupling protein 2 (mitochondrial, proton carrier)), TFAP2A (transcription factor AP-2 alpha (activating enhancer binding protein 2 alpha)), C4BPA (complement component 4 binding protein, alpha), SERPINF2 (serpin peptidase inhibitor, clade F (alpha-2 antiplasmin, pigment epithelium derived factor), member 2), TYMP (thymidine phosphorylase), ALPP (alkaline phosphatase, placental (Regan isozyme)), CXCR2 (chemokine (C-X-C motif) receptor 2), SLC39A3 (solute carrier family 39 (zinc transporter), member 3), ABCG2 (ATP-binding cassette, sub-family G (WHITE), member 2), ADA (adenosine deaminase), JAK3 (Janus kinase 3), HSPA1A (heat shock 70 kDa protein 1A), FASN (fatty acid synthase), FGF1 (fibroblast growth factor 1 (acidic)), F11 (coagulation factor XI), ATP7A (ATPase, Cu++ transporting, alpha polypeptide), CR1 (complement component (3b/4b) receptor 1 (Knops blood group)), GFAP (glial fibrillary acidic protein), ROCK1 (Rho-associated, coiled-coil containing protein kinase 1), MECP2 (methyl CpG binding protein 2 (Rett syndrome)), MYLK (myosin light chain kinase), BCHE (butyrylcholinesterase), LIPE (lipase, hormone-sensitive), PRDX5 (peroxiredoxin 5), ADORA1 (adenosine A1 receptor), WRN (Werner syndrome, RecQ helicase-like), CXCR3 (chemokine (C-X-C motif) receptor 3), CD81 (CD81 molecule), SMAD7 (SMAD family member 7), LAMC2 (laminin, gamma 2), MAP3K5 (mitogen-activated protein kinase kinase kinase 5), CHGA (chromogranin A (parathyroid secretory protein 1)), IAPP (islet amyloid polypeptide), RHO (rhodopsin), ENPP1 (ectonucleotide pyrophosphatase/phosphodiesterase 1), PTHLH (parathyroid hormone-like hormone), NRG1 (neuregulin 1), VEGFC (vascular endothelial growth factor C), ENPEP (glutamyl aminopeptidase (aminopeptidase A)), CEBPB (CCAAT/enhancer binding protein (C/EBP), beta), NAGLU (N-acetylglucosaminidase, alpha-), F2RL3 (coagulation factor II (thrombin) receptor-like 3), CX3CL1 (chemokine (C-X3-C motif) ligand 1), BDKRB1 (bradykinin receptor B1), ADAMTS13 (ADAM metallopeptidase with thrombospondin type 1 motif, 13), ELANE (elastase, neutrophil expressed), ENPP2 (ectonucleotide pyrophosphatase/phosphodiesterase 2), CISH (cytokine inducible SH2-containing protein), GAST (gastrin), MYOC (myocilin, trabecular meshwork inducible glucocorticoid response), ATP1A2 (ATPase, Na+/K+ transporting, alpha 2 polypeptide), NF1 (neurofibromin 1), GJB1 (gap junction protein, beta 1, 32 kDa), MEF2A (myocyte enhancer factor 2A), VCL (vinculin), BMPR2 (bone morphogenetic protein receptor, type II (serine/threonine kinase)), TUBB (tubulin, beta), CDC42 (cell division cycle 42 (GTP binding protein, 25 kDa)), KRT18 (keratin 18), HSF1 (heat shock transcription factor 1), MYB (v-myb myeloblastosis viral oncogene homolog (avian)), PRKAA2 (protein kinase, AMP-activated, alpha 2 catalytic subunit), ROCK2 (Rho-associated, coiled-coil containing protein kinase 2), TFPI (tissue factor pathway inhibitor (lipoprotein-associated coagulation inhibitor)), PRKG1 (protein kinase, cGMP-dependent, type I), BMP2 (bone morphogenetic protein 2), CTNND1 (catenin (cadherin-associated protein), delta 1), CTH (cystathionase (cystathionine gamma-lyase)), CTSS (cathepsin S), VAV2 (vav 2 guanine nucleotide exchange factor), NPY2R (neuropeptide Y receptor Y2), IGFBP2 (insulin-like growth factor binding protein 2, 36 kDa), CD28 (CD28 molecule), GSTA1 (glutathione S-transferase alpha 1), PPIA (peptidylprolyl isomerase A (cyclophilin A)), APOH (apolipoprotein H (beta-2-glycoprotein 1)), S100A8 (S100 calcium binding protein A8), IL11 (interleukin 11), ALOX15 (arachidonate 15-lipoxygenase), FBLN1 (fibulin 1), NR1H3 (nuclear receptor subfamily 1, group H, member 3), SCD (stearoyl-CoA desaturase (delta-9-desaturase)), GIP (gastric inhibitory polypeptide), CHGB (chromogranin B (secretogranin 1)), PRKCB (protein kinase C, beta), SRD5A1 (steroid-5-alpha-reductase, alpha polypeptide 1 (3-oxo-5 alpha-steroid delta 4-dehydrogenase alpha 1)), HSD11B2 (hydroxysteroid (11-beta) dehydrogenase 2), CALCRL (calcitonin receptor-like), GALNT2 (UDP-N-acetyl-alpha-D-galactosamine.polypeptide N-acetylgalactosaminyltransferase 2 (GalNAc-T2)), ANGPTL4 (angiopoietin-like 4), KCNN4 (potassium intermediate/small conductance calcium-activated channel, subfamily N, member 4), PIK3C2A (phosphoinositide-3-kinase, class 2, alpha polypeptide), HBEGF (heparin-binding EGF-like growth factor), CYP7A1 (cytochrome P450, family 7, subfamily A, polypeptide 1), HLA-DRB5 (major histocompatibility complex, class II, DR beta 5), BNIP3 (BCL2/adenovirus E1B 19 kDa interacting protein 3), GCKR (glucokinase (hexokinase 4) regulator), S100A12 (S100 calcium binding protein A12), PADI4 (peptidyl arginine deiminase, type IV), HSPA14 (heat shock 70 kDa protein 14), CXCR1 (chemokine (C-X-C motif) receptor 1), H19 (H19, imprinted maternally expressed transcript (non-protein coding)), KRTAP19-3 (keratin associated protein 19-3), IDDM2 (insulin-dependent diabetes mellitus 2), RAC2 (ras-related C3 botulinum toxin substrate 2 (rho family, small GTP binding protein Rac2)), RYR1 (ryanodine receptor 1 (skeletal)), CLOCK (clock homolog (mouse)), NGFR (nerve growth factor receptor (TNFR superfamily, member 16)), DBH (dopamine beta-hydroxylase (dopamine beta-monooxygenase)), CHRNA4 (cholinergic receptor, nicotinic, alpha 4), CACNA1C (calcium channel, voltage-dependent, L type, alpha 1C subunit), PRKAG2 (protein kinase, AMP-activated, gamma 2 non-catalytic subunit), CHAT (choline acetyltransferase), PTGDS (prostaglandin D2 synthase 21 kDa (brain)), NR1H2 (nuclear receptor subfamily 1, group H, member 2), TEK (TEK tyrosine kinase, endothelial), VEGFB (vascular endothelial growth factor B), MEF2C (myocyte enhancer factor 2C), MAPKAPK2 (mitogen-activated protein kinase-activated protein kinase 2), TNFRSF11A (tumor necrosis factor receptor superfamily, member 11a, NFKB activator), HSPA9 (heat shock 70 kDa protein 9 (mortalin)), CYSLTR1 (cysteinyl leukotriene receptor 1), MAT1A (methionine adenosyltransferase I, alpha), OPRL1 (opiate receptor-like 1), IMPA1 (inositol(myo)-1(or 4)-monophosphatase 1), CLCN2 (chloride channel 2), DLD (dihydrolipoamide dehydrogenase), PSMA6 (proteasome (prosome, macropain) subunit, alpha type, 6), PSMB8 (proteasome (prosome, macropain) subunit, beta type, 8 (large multifunctional peptidase 7)), CHI3L1 (chitinase 3-like 1 (cartilage glycoprotein-39)), ALDH1B1 (aldehyde dehydrogenase 1 family, member B1), PARP2 (poly (ADP-ribose) polymerase 2), STAR (steroidogenic acute regulatory protein), LBP (lipopolysaccharide binding protein), ABCC6 (ATP-binding cassette, sub-family C(CFTR/MRP), member 6), RGS2 (regulator of G-protein signaling 2, 24 kDa), EFNB2 (ephrin-B2), GJB6 (gap junction protein, beta 6, 30 kDa), APOA2 (apolipoprotein A-II), AMPD1 (adenosine monophosphate deaminase 1), DYSF (dysferlin, limb girdle muscular dystrophy 2B (autosomal recessive)), FDFT1 (farnesyl-diphosphate farnesyltransferase 1), EDN2 (endothelin 2), CCR6 (chemokine (C-C motif) receptor 6), GJB3 (gap junction protein, beta 3, 31 kDa), IL1RL1 (interleukin 1 receptor-like 1), ENTPD1 (ectonucleoside triphosphate diphosphohydrolase 1), BBS4 (Bardet-Biedl syndrome 4), CELSR2 (cadherin, EGF LAG seven-pass G-type receptor 2 (flamingo homolog, Drosophila)), F11R (F11 receptor), RAPGEF3 (Rap guanine nucleotide exchange factor (GEF) 3), HYAL1 (hyaluronoglucosaminidase 1), ZNF259 (zinc finger protein 259), ATOX1 (ATX1 antioxidant protein 1 homolog (yeast)), ATF6 (activating transcription factor 6), KHK (ketohexokinase (fructokinase)), SAT1 (spermidine/spermine N1-acetyltransferase 1), GGH (gamma-glutamyl hydrolase (conjugase, folylpolygammaglutamyl hydrolase)), TIMP4 (TIMP metallopeptidase inhibitor 4), SLC4A4 (solute carrier family 4, sodium bicarbonate cotransporter, member 4), PDE2A (phosphodiesterase 2A, cGMP-stimulated), PDE3B (phosphodiesterase 3B, cGMP-inhibited), FADS1 (fatty acid desaturase 1), FADS2 (fatty acid desaturase 2), TMSB4X (thymosin beta 4, X-linked), TXNIP (thioredoxin interacting protein), LIMS1 (LIM and senescent cell antigen-like domains 1), RHOB (ras homolog gene family, member B), LY96 (lymphocyte antigen 96), FOXO1 (forkhead box O1), PNPLA2 (patatin-like phospholipase domain containing 2), TRH (thyrotropin-releasing hormone), GJC1 (gap junction protein, gamma 1, 45 kDa), SLC17A5 (solute carrier family 17 (anion/sugar transporter), member 5), FTO (fat mass and obesity associated), GJD2 (gap junction protein, delta 2, 36 kDa), PSRC1 (proline/serine-rich coiled-coil 1), CASP12 (caspase 12 (gene/pseudogene)), GPBAR1 (G protein-coupled bile acid receptor 1), PXK (PX domain containing serine/threonine kinase), IL33 (interleukin 33), TRIB1 (tribbles homolog 1 (Drosophila)), PBX4 (pre-B-cell leukemia homeobox 4), NUPR1 (nuclear protein, transcriptional regulator, 1), 15-Sep(15 kDa selenoprotein), CILP2 (cartilage intermediate layer protein 2), TERC (telomerase RNA component), GGT2 (gamma-glutamyltransferase 2), MT-CO1 (mitochondrially encoded cytochrome c oxidase I), and UOX (urate oxidase, pseudogene). Any of these sequences, may be a target for the CRISPR-Cas system, e.g., to address mutation.

[1421] In an additional embodiment, the chromosomal sequence may further be selected from Pon1 (paraoxonase 1), LDLR (LDL receptor), ApoE (Apolipoprotein E), Apo B-100 (Apolipoprotein B-100), ApoA (Apolipoprotein(a)), ApoA1 (Apolipoprotein A1), CBS (Cystathione B-synthase), Glycoprotein IIb/IIb, MTRF (5,10-methylenetetrahydrofolate reductase (NADPH), and combinations thereof. In one iteration, the chromosomal sequences and proteins encoded by chromosomal sequences involved in cardiovascular disease may be chosen from CacnalC, Sod1, Pten, Ppar(alpha), Apo E, Leptin, and combinations thereof as target(s) for the CRISPR-Cas system.

[1422] A person with ordinary skill in the art may use the method disclosed herein in a system similar to the methods as above described with the C2c1-CRISPR system as disclosed herein. With respect to the C2c1 protein, the CRISPR-C2c1 system may recognize a PAM sequence that is a T-rich sequence. In some embodiments, the PAM sequence is 5′ TTN 3′ or 5′ ATTN 3′, wherein N is any nucleotide. In some embodiments, the CRISPR-C2c1 system introduces one or more staggered double strand breaks (DSBs) with a 5′ overhang to the target gene. In particular embodiments, the 5′ overhang is 7 nt. In some embodiments, the CRISPR-C2c1 system introduces a template DNA sequence at the staggered DSB via HR or NHEJ. In some particular embodiments, the CRISPR-C2c1 system comprises a catalytically inactivated C2c1 protein associated with a functional domain that modifies the target gene. In a particular embodiment, the CRISPR-C2c1 system introduces a single mutation. In another particular embodiment, the CRISPR-C2c1 system introduces a single nucleotide modification to the transcript of the target gene.

[1423] Treating Diseases of the Liver and Kidney

[1424] The present invention also contemplates delivering the CRISPR-Cas system described herein, e.g. C2c1 effector protein systems, to the liver and/or kidney. Delivery strategies to induce cellular uptake of the therapeutic nucleic acid include physical force or vector systems such as viral-, lipid- or complex-based delivery, or nanocarriers. From the initial applications with less possible clinical relevance, when nucleic acids were addressed to renal cells with hydrodynamic high pressure injection systemically, a wide range of gene therapeutic viral and non-viral carriers have been applied already to target posttranscriptional events in different animal kidney disease models in vivo (Csaba Revesz and Peter Hamar (2011). Delivery Methods to Target RNAs in the Kidney, Gene Therapy Applications, Prof. Chunsheng Kang (Ed.), ISBN: 978-953-307-541-9, InTech, Available from: www.intechopen.com/books/gene-therapy-applications/delivery-methods-to-target-rnas-inthe-kidney). Delivery methods to the kidney may include those in Yuan et al. (Am J Physiol Renal Physiol 295: F605-F617, 2008) investigated whether in vivo delivery of small interfering RNAs (siRNAs) targeting the 12/15-lipoxygenase (12/15-LO) pathway of arachidonate acid metabolism can ameliorate renal injury and diabetic nephropathy (DN) in a streptozotocininjected mouse model of type 1 diabetes. To achieve greater in vivo access and siRNA expression in the kidney, Yuan et al. used double-stranded 12/15-LO siRNA oligonucleotides conjugated with cholesterol. About 400 μg of siRNA was injected subcutaneously into mice. The method of Yuang et al. may be applied to the CRISPR Cas system of the present invention contemplating a 1-2 g subcutaneous injection of CRISPR Cas conjugated with cholesterol to a human for delivery to the kidneys.

[1425] Molitoris et al. (J Am Soc Nephrol 20: 1754-1764, 2009) exploited proximal tubule cells (PTCs), as the site of oligonucleotide reabsorption within the kidney to test the efficacy of siRNA targeted to p53, a pivotal protein in the apoptotic pathway, to prevent kidney injury. Naked synthetic siRNA to p53 injected intravenously 4 h after ischemic injury maximally protected both PTCs and kidney function. Molitoris et al.'s data indicates that rapid delivery of siRNA to proximal tubule cells follows intravenous administration. For dose-response analysis, rats were injected with doses of siP53, 0.33; 1, 3, or 5 mg/kg, given at the same four time points, resulting in cumulative doses of 1.32; 4, 12, and 20 mg/kg, respectively. All siRNA doses tested produced a SCr reducing effect on day one with higher doses being effective over approximately five days compared with PBS-treated ischemic control rats. The 12 and 20 mg/kg cumulative doses provided the best protective effect. The method of Molitoris et al. may be applied to the nucleic acid-targeting system of the present invention contemplating 12 and 20 mg/kg cumulative doses to a human for delivery to the kidneys.

[1426] Thompson et al. (Nucleic Acid Therapeutics, Volume 22, Number 4, 2012) reports the toxicological and pharmacokinetic properties of the synthetic, small interfering RNA I5NP following intravenous administration in rodents and nonhuman primates. I5NP is designed to act via the RNA interference (RNAi) pathway to temporarily inhibit expression of the pro-apoptotic protein p53 and is being developed to protect cells from acute ischemia/reperfusion injuries such as acute kidney injury that can occur during major cardiac surgery and delayed graft function that can occur following renal transplantation. Doses of 800 mg/kg I5NP in rodents, and 1,000 mg/kg I5NP in nonhuman primates, were required to elicit adverse effects, which in the monkey were isolated to direct effects on the blood that included a sub-clinical activation of complement and slightly increased clotting times. In the rat, no additional adverse effects were observed with a rat analogue of I5NP, indicating that the effects likely represent class effects of synthetic RNA duplexes rather than toxicity related to the intended pharmacologic activity of I5NP. Taken together, these data support clinical testing of intravenous administration of I5NP for the preservation of renal function following acute ischemia/reperfusion injury. The no observed adverse effect level (NOAEL) in the monkey was 500 mg/kg. No effects on cardiovascular, respiratory, and neurologic parameters were observed in monkeys following i.v. administration at dose levels up to 25 mg/kg. Therefore, a similar dosage may be contemplated for intravenous administration of CRISPR Cas to the kidneys of a human.

[1427] Shimizu et al. (J Am Soc Nephrol 21: 622-633, 2010) developed a system to target delivery of siRNAs to glomeruli via poly(ethylene glycol)-poly(L-lysine)-based vehicles. The siRNA/nanocarrier complex was approximately 10 to 20 nm in diameter, a size that would allow it to move across the fenestrated endothelium to access to the mesangium. After intraperitoneal injection of fluorescence-labeled siRNA/nanocarrier complexes, Shimizu et al. detected siRNAs in the blood circulation for a prolonged time. Repeated intraperitoneal administration of a mitogen-activated protein kinase 1 (MAPK1) siRNA/nanocarrier complex suppressed glomerular MAPK1 mRNA and protein expression in a mouse model of glomerulonephritis. For the investigation of siRNA accumulation, Cy5-labeled siRNAs complexed with PIC nanocarriers (0.5 ml, 5 nmol of siRNA content), naked Cy5-labeled siRNAs (0.5 ml, 5 nmol), or Cy5-labeled siRNAs encapsulated in HVJ-E (0.5 ml, 5 nmol of siRNA content) were administrated to BALBc mice. The method of Shimizu et al. may be applied to the nucleic acid-targeting system of the present invention contemplating a dose of about of 10-20 μmol CRISPR Cas complexed with nanocarriers in about 1-2 liters to a human for intraperitoneal administration and delivery to the kidneys.

[1428] A person with ordinary skill in the art may use the method disclosed herein with methods as described in Shimizu et al., Thompson et al., and Molitoris et al. with the C2c1-CRISPR system as disclosed herein. With respect to the C2c1 protein, the CRISPR-C2c1 system may recognize a PAM sequence that is a T-rich sequence. In some embodiments, the PAM sequence is 5′ TTN 3′ or 5′ ATTN 3′, wherein N is any nucleotide. In some embodiments, the CRISPR-C2c1 system introduces one or more staggered double strand breaks (DSBs) with a 5′ overhang to the target gene. In particular embodiments, the 5′ overhang is 7 nt. In some embodiments, the CRISPR-C2c1 system introduces a template DNA sequence at the staggered DSB via HR or NHEJ. In some particular embodiments, the CRISPR-C2c1 system comprises a catalytically inactivated C2c1 protein associated with a functional domain that modifies the target gene. In a particular embodiment, the CRISPR-C2c1 system introduces a single mutation. In another particular embodiment, the CRISPR-C2c1 system introduces a single nucleotide modification to the transcript of the target gene.

### Delivery Methods to the Kidney are Summarized as Follows:

| Delivery | | Target | | | Functional | |
|---|---|---|---|---|---|---|
| method | Carrier | RNA | Disease | Model | assays | Author |
| Hydrodynamic/ | TransIT In | p85α | Acute | Ischemia- | Uptake, | Larson et al., |
| Lipid | Vivo Gene | | renal | reperfusion | biodistribution | Surgery, (August |
| | Delivery | | injury | | | 2007), Vol. |
| | System, | | | | | 142, No. 2, pp. |
| | DOTAP | | | | | (262-269) |
| Hydrodynamic/ | Lipofectamine | Fas | Acute | Ischemia- | Blood urea | Hamar et al., |
| Lipid | 2000 | | renal | reperfusion | nitrogen, Fas | Proc Natl |
| | | | injury | | Immunohistochemistry, | Acad Sci, (October |
| | | | | | apoptosis, | 2004), Vol. |
| | | | | | histological | 101, No. 41, pp. |
| | | | | | scoring | (14883-14888) |
| Hydrodynamic | n.a. | Apoptosis | Acute | Ischemia- | n.a. | Zheng et al., |
| | | cascade | renal | reperfusion | | Am J Pathol, |
| | | elements | injury | | | (October 2008), |
| | | | | | | Vol. 173, No. 4, |
| | | | | | | pp. (973-980) |
| Hydrodynamic | n.a. | Nuclear | Acute | Ischemia- | n.a. | Feng et al., |
| | | factor | renal | reperfusion | | Transplantation, |
| | | kappa-b | injury | | | (May 2009), |
| | | (NFkB) | | | | Vol. 87, No. 9, |
| | | | | | | pp. (1283-1289) |
| Hydrodynamic/ | Lipofectamine | Apoptosis | Acute | Ischemia- | Apoptosis, | Xie & Guo, |
| Viral | 2000 | antagonizing | renal | reperfusion | oxidative | Am Soc Nephrol, |
| | | transcription | injury | | stress, caspase | (December 2006), |
| | | factor | | | activation, | Vol. 17, No. 12, |
| | | (AATF) | | | membrane lipid | pp. (3336-3346) |
| | | | | | peroxidation | |
| Hydrodynamic | pBAsi mU6 | Gremlin | Diabetic | Streptozotozin- | Proteinuria, | Q. Zhang et al., |
| | Neo/TransIT-EE | | nephropathy | induced | serum creatinine, | PloS ONE, |
| | Hydrodynamic | | | diabetes | glomerular and | (July 2010), |
| | Delivery | | | | tubular diameter, | Vol. 5, No. 7, |
| | System | | | | collagen type IV/ | e11709, |
| | | | | | BMP7 expression | pp. (1-13) |
| Viral/Lipid | pSUPER | TGF-β | Interstitial | Unilateral | α-SMA | Kushibikia et al., |
| | vector/ | type II | renal | urethral | expression, | J Controlled |
| | Lipofectamine | receptor | fibrosis | obstruction | collagen | Release, (July 2005), |
| | | | | | content, | Vol. 105, No. 3, |
| | | | | | | pp. (318-331) |
| Viral | Adeno- | Mineral | Hyper- | Cold- | blood pressure, | Wang et al., |
| | associated | corticoid | tension | induced | serum albumin, | Gene Therapy, |
| | virus-2 | receptor | caused | hypertension | serum urea | (July 2006), |
| | | | renal | | nitrogen, serum | Vol. 13, No. 14, |
| | | | damage | | creatinine, | pp. (1097-1103) |
| | | | | | kidney weight, | |
| | | | | | urinary sodium | |
| Hydrodynamic/ | pU6 vector | Luciferase | n.a. | n.a. | uptake | Kobayashi et al., |
| Viral | | | | | | Journal of |
| | | | | | | Pharmacology and |
| | | | | | | Experimental |
| | | | | | | Therapeutics, |
| | | | | | | (February 2004), |
| | | | | | | Vol. 308, No. 2, |
| | | | | | | pp. (688-693) |
| Lipid | Lipoproteins, | apoB1, | n.a. | n.a. | Uptake, binding | Wolfrum et al., |
| | albumin | apoM | | | affinity to | Nature Biotechnology, |
| | | | | | lipoproteins | (September 2007), |
| | | | | | and albumin | Vol. 25, No. 10, |
| | | | | | | pp. (1149-1157) |
| Lipid | Lipofectamine | p53 | Acute | Ischemic and | Histological | Molitoris et al., |
| | 2000 | | renal | cisplatin- | scoring, | J Am Soc Nephrol, |
| | | | injury | induced acute | apoptosis | (August 2009), |
| | | | | injury | | Vol. 20, No. 8, |
| | | | | | | pp. (1754-1764) |
| Lipid | DOTAP/DOPE, | COX-2 | Breast | MDA-MB-231 | Cell viability, | Mikhaylova et al., |
| | DOTAP/DOPE/ | | adeno- | breast cancer | uptake | Cancer Gene Therapy, |
| | DOPE- | | carcinoma | xenograft- | | (March 2011), Vol. |
| | PEG2000 | | | bearing | | 16, No. 3, pp. |
| | | | | mouse | | (217-226) |
| Lipid | Cholesterol | 12/15- | Diabetic | Streptozotocin- | Albuminuria, | Yuan et al., |
| | | lipoxygenase | nephro- | induced | urinary creatinine, | Am J Physiol |
| | | | pathy | diabetes | histology, type I | Renal Physiol, |
| | | | | | and IV collagen, | (June 2008), |
| | | | | | TGF-β, fibronectin, | Vol. 295, |
| | | | | | plasminogen activator | pp. (F605-F617) |
| | | | | | inhibitor 1 | |
| Lipid | Lipofectamine | Mitochondrial | Diabetic | Streptozotocin - | Cell proliferation | Y. Zhang et al., |
| | 2000 | membrane | nephro- | induced | and apoptosis, | J Am Soc Nephrol, |
| | | 44 | pathy | diabetes | histology, ROS, | (April 2006), |
| | | (TIM44) | | | mitochondrial | Vol. 17, No. 4, |
| | | | | | import of Mn- | pp. (1090-1101) |
| | | | | | SOD and glutathione | |
| | | | | | peroxidase, cellular | |
| | | | | | membrane | |
| | | | | | polarization | |
| Hydrodynamic/ | Proteolipo- | RLIP76 | Renal | Caki-2 kidney | uptake | Singhal et al., |
| Lipid | some | | carcinoma | cancer | | Cancer Res, |
| | | | | xenograft- | | (May 2009), |
| | | | | bearing mouse | | Vol. 69, No. 10, |
| | | | | | | pp. (4244-4251) |
| Polymer | PEGylated | Luciferase | n.a. | n.a. | Uptake, | Malek et al., |
| | PEI | pGL3 | | | biodistribution, | Toxicology and |
| | | | | | erythrocyte | Applied |
| | | | | | aggregation | Pharmacology, |
| | | | | | | (April 2009), |
| | | | | | | Vol. 236, No. 1, |
| | | | | | | pp. (97-108) |
| Polymer | PEGylated | MAPK1 | Lupus | Glomerulo- | Proteinuria, | Shimizu et al., |
| | poly-L-lysine | | glomerulo- | nephritis | glomerulo- | J Am Soc |
| | | | nephritis | | sclerosis, | Nephrology, |
| | | | | | TGF-β, | (April 2010), |
| | | | | | fibronectin, | Vol. 21, No. 4, |
| | | | | | plasminogen | pp. (622-633) |
| | | | | | activator | |
| | | | | | inhibitor 1 | |
| Polymer/Nano | Hyaluronic | VEGF | Kidney | B16F1 | Biodistribution, | Jiang et al., |
| particle | acid/Quantum | | cancer/ | melanoma | citotoxicity, | Molecular |
| | dot/PEI | | melanoma | tumor- | tumor volume, | Pharmaceutics, |
| | | | | bearing | endocytosis | (May-June 2009), |
| | | | | mouse | | Vol. 6, No. 3, |
| | | | | | | pp. (727-737) |
| Polymer/Nano | PEGylated | GAPDH | n.a. | n.a. | cell viability, | Cao et al, |
| particle | polycapro- | | | | uptake | J Controlled |
| | lactone | | | | | Release, |
| | nanofiber | | | | | (June 2010), |
| | | | | | | Vol. 144, No. 2, |
| | | | | | | pp. (203-212) |
| Aptamer | Spiegelmer | CC | Glomerulo | Uninephrecto- | urinary albumin, | Ninichuk et al., |
| | mNOX-E36 | chemokine | sclerosis | mized | urinary creatinine, | Am J Pathol, |
| | | ligand 2 | | mouse | histopathology, | (March 2008), |
| | | | | | glomerular | Vol. 172, No. 3, |
| | | | | | filtration rate, | pp. (628-637) |
| | | | | | macrophage count, | |
| | | | | | serum Ccl2, | |
| | | | | | Mac-2+, Ki-67+ | |
| Aptamer | Aptamer | vasopressin | Congestive | n.a. | Binding affinity | Purschke et al., |
| | NOX-F37 | (AVP) | heart | | to D-AVP, | Proc Natl |
| | | | failure | | Inhibition of | Acad Sci, |
| | | | | | AVP Signaling, | (March 2006), |
| | | | | | Urine osmolality | Vol. 103, No. 13, |
| | | | | | and sodium | pp. (5173-5178) |
| | | | | | concentration, | |

### Targeting the Liver or Liver Cells

[1430] Targeting liver cells is provided. This may be in vitro or in vivo. Hepatocytes are preferred. Delivery of the CRISPR protein, such as C2c1 herein may be via viral vectors, especially AAV (and in particular AAV2/6) vectors. These may be administered by intravenous injection.

[1431] A preferred target for liver, whether in vitro or in vivo, is the albumin gene. This is a so-called ‘safe harbor” as albumin is expressed at very high levels and so some reduction in the production of albumin following successful gene editing is tolerated. It is also preferred as the high levels of expression seen from the albumin promoter/enhancer allows for useful levels of correct or transgene production (from the inserted donor template) to be achieved even if only a small fraction of hepatocytes are edited.

[1432] Intron 1 of albumin has been shown by Wechsler et al. (reported at the 57th Annual Meeting and Exposition of the American Society of Hematology—abstract available online at ash.confex.com/ash/2015/webprogram/Paper86495.html and presented on 6 Dec. 2015) to be a suitable target site. Their work used Zn Fingers to cut the DNA at this target site, and suitable guide sequences can be generated to guide cleavage at the same site by a CRISPR protein.

[1433] The use of targets within highly-expressed genes (genes with highly active enhancers/promoters) such as albumin may also allow a promoterless donor template to be used, as reported by Wechsler et al. and this is also broadly applicable outside liver targeting. Other examples of highly-expressed genes are known.

### Other Disease of the Liver

[1434] In particular embodiments, the CRISPR proteins of the present invention are used in the treatment of liver disorders such as transthyretin amyloidosis (ATTR), alpha-1 antitrypsin deficiency and other hepatic-based inborn errors of metabolism. FAP is caused by a mutation in the gene that encodes transthyretin (TTR). While it is an autosomal dominant disease, not al carriers develop the disease. There are over 100 mutations in the TTR gene known to be associated with the disease. Examples of common mutations include V30M. The principle of treatment of TTR based on gene silencing has been demonstrated by studies with iRNA (Ueda et al. 2014 Transl Neurogener. 3:19). Wilson's Disease (WD) is caused by mutations in the gene encoding ATP7B, which is found exclusively in the hepatocyte. There are over 500 mutations associated with WD, with increased prevalence in specific regions such as East Asia. Other examples are A1ATD (an autosomal recessive disease caused by mutations in the SERPINA1 gene) and PKU (an autosomal recessive disease caused by mutations in the phenylalanine hydroxylase (PAH) gene).

[1435] In one aspect, the present invention provides a method of treating liver disorders, comprising delivery to the cell a C2c1-CRIPSR system comprising a C2c1-CRISPR complexed with a tracr RNA, a guide RNA comprising a guide sequence and a direct repeat, wherein the guide sequence hybridizes with the target sequence of genes involved in liver disorders, the CRISPR-C2c1 system may recognize a PAM sequence that is a T-rich sequence. In some embodiments, the PAM sequence is 5′ TTN 3′ or 5′ ATTN 3′, wherein N is any nucleotide. In some embodiments, the CRISPR-C2c1 system introduces one or more staggered double strand breaks (DSBs) with a 5′ overhang to the target gene. In particular embodiments, the 5′ overhang is 7 nt. In some embodiments, the CRISPR-C2c1 system introduces a template DNA sequence at the staggered DSB via HR or NHEJ. In some particular embodiments, the CRISPR-C2c1 system comprises a catalytically inactivated C2c1 protein associated with a functional domain that modifies the target gene. In a particular embodiment, the CRISPR-C2c1 system introduces a single mutation. In another particular embodiment, the CRISPR-C2c1 system introduces a single nucleotide modification to the transcript of the target gene.

### Liver—Associated Blood Disorders, Especially Hemophilia and in Particular Hemophilia B

[1436] Successful gene editing of hepatocytes has been achieved in mice (both in vitro and in vivo) and in non-human primates (in vivo), showing that treatment of blood disorders through gene editing/genome engineering in hepatocytes is feasible. In particular, expression of the human F9 (hF9) gene in hepatocytes has been shown in non-human primates indicating a treatment for Hemophillia B in humans. In one aspect, the present invention provides a method of treating liver-associated blood disorders, comprising delivery to the cell a C2c1-CRIPSR system comprising a C2c1-CRISPR complexed with a tracr RNA, a guide RNA comprising a guide sequence and a direct repeat, wherein the guide sequence hybridizes with the target sequence of genes involved in liver disorders, the CRISPR-C2c1 system may recognize a PAM sequence that is a T-rich sequence. In some embodiments, the PAM sequence is 5′ TTN 3′ or 5′ ATTN 3′, wherein N is any nucleotide. In some embodiments, the CRISPR-C2c1 system introduces one or more staggered double strand breaks (DSBs) with a 5′ overhang to the target gene. In particular embodiments, the 5′ overhang is 7 nt. In some embodiments, the CRISPR-C2c1 system introduces a template DNA sequence at the staggered DSB via HR or NHEJ. In some particular embodiments, the CRISPR-C2c1 system comprises a catalytically inactivated C2c1 protein associated with a functional domain that modifies the target gene. In a particular embodiment, the CRISPR-C2c1 system introduces a single mutation. In another particular embodiment, the CRISPR-C2c1 system introduces a single nucleotide modification to the transcript of the target gene.

[1437] Wechsler et al. reported at the 57th Annual Meeting and Exposition of the American Society of Hematology (abstract presented 6 Dec. 2015 and available online at ash.confex.com/ash/2015/webprogram/Paper86495.html) that they has successfully expressed human F9 (hF9) from hepatocytes in non-human primates through in vivo gene editing. This was achieved using 1) two zinc finger nucleases (ZFNs) targeting intron 1 of the albumin locus, and 2) a human F9 donor template construct. The ZFNs and donor template were encoded on separate hepatotropic adeno-associated virus serotype 2/6 (AAV2/6) vectors injected intravenously, resulting in targeted insertion of a corrected copy of the hF9 gene into the albumin locus in a proportion of liver hepatocytes.

[1438] The albumin locus was selected as a “safe harbor” as production of this most abundant plasma protein exceeds 10 g/day, and moderate reductions in those levels are well-tolerated. Genome edited hepatocytes produced normal hFIX (hF9) in therapeutic quantities, rather than albumin, driven by the highly active albumin enhancer/promoter. Targeted integration of the hF9 transgene at the albumin locus and splicing of this gene into the albumin transcript was shown.

[1439] Mice studies: C57BL/6 mice were administered vehicle (n=20) or AAV2/6 vectors (n=25) encoding mouse surrogate reagents at 1.0×1013 vector genome (vg)/kg via tail vein injection. ELISA analysis of plasma hFIX in the treated mice showed peak levels of 50-1053 ng/mL that were sustained for the duration of the 6-month study. Analysis of FIX activity from mouse plasma confirmed bioactivity commensurate with expression levels.

[1440] Non-human primate (NHP) studies: a single intravenous co-infusion of AAV2/6 vectors encoding the NHP targeted albumin-specific ZFNs and a human F9 donor at 1.2×1013 vg/kg (n=5/group) resulted in >50 ng/mL (>1% of normal) in this large animal model. The use of higher AAV2/6 doses (up to 1.5×1014 vg/kg) yielded plasma hFIX levels up to 1000 ng/ml (or 20% of normal) in several animals and up to 2000 ng/ml (or 50% of normal) in a single animal, for the duration of the study (3 months).

[1441] The treatment was well tolerated in mice and NHPs, with no significant toxicological findings related to AAV2/6 ZFN+donor treatment in either species at therapeutic doses. Sangamo (CA, USA) has since applied to the FDA, and been granted, permission to conduct the world's first human clinical trial for an in vivo genome editing application. This follows on the back of the EMEA's approval of the Glybera gene therapy treatment of lipoprotein lipase deficiency.

[1442] Accordingly, it is preferred, in some embodiments, that any or all of the following are used: AAV (especially AAV2/6) vectors, preferably administered by intravenous injection; Albumin as target for gene editing/insertion of transgene/template-especially at intron 1 of albumin; human F9 donor template; and/or a promoterless donor template.

### Hemophilia B

[1443] Accordingly, in some embodiments, it is preferred that the present invention is used to treat Hemophilia B. As such it is preferred that F9 (Factor IX) is targeted through provision of a suitable guide RNA. The enzyme and the guide may ideally be targeted to the liver where F9 is produced, although they can be delivered together or separately. A template is provided, in some embodiments, and that this is the human F9 gene. It will be appreciated that the hF9 template comprises the wt or ‘correct’ version of hF9 so that the treatment is effective. In some embodiments, a two-vector system may be used—one vector for the C2c1 and one vector for the repair template(s). The repair template may include two or more repair templates, for example, two F9 sequences from different mammalian species. In some embodiments, both a mouse and human F9 sequence are provided. This is may be delivered to mice. Yang Yang, John White, McMenamin Deirdre, and Peter Bell, PhD, presenting at 58th Annual American Society of Hematology Meeting (November 2016), report that this increases potency and accuracy. The second vector inserted the human sequence of factor IX into the mouse genome. In some embodiments, the targeted insertion leads to the expression of a chimeric hyperactive factor IX protein. In some embodiments, this is under the control of the native mouse factor IX promoter. Injecting this two-component system (vector 1 and vector 2) into newborn and adult “knock-out” mice at increasing doses led to expression and activity of stable factor IX activity at normal (or even higher) levels for over four months. In the case of treating humans, a native human F9 promoter may be used instead. In some embodiments, the wt phenotype is restored.

[1444] In an alternative embodiment, the hemophilia B version of F9 may be delivered so as to create a model organism, cell or cell line (for example a murine or non-human primate model organism, cell or cell line), the model organism, cell or cell line having or carrying the Hemophilia B phenotype, i.e. an inability to produce wt F9.

### Hemophilia A

[1445] In some embodiments, the F9 (factor IX) gene may be replaced by the F8 (factor VIII) gene described above, leading to treatment of Hemophilia A (through provision of a correct F8 gene) and/or creation of a Hemophilia A model organism, cell or cell line (through provision of an incorrect, Hemophilia A version of the F8 gene).

### Hemophilia C

[1446] In some embodiments, the F9 (factor IX) gene may be replaced by the F11 (factor XI) gene described above, leading to treatment of Hemophilia C (through provision of a correct F11 gene) and/or creation of a Hemophilia C model organism, cell or cell line (through provision of an incorrect, Hemophilia C version of the F11 gene).

### Transthyretin Amyloidosis

[1447] Transthyretin is a protein, mainly produced in the liver, present in the serum and CSF which carries thyroxin hormone and retinol binding protein bound to retinol (Vitamin A). Over 120 different mutations can cause Transthyretin amyloidosis (ATTR), a heritable genetic disorder wherein mutant forms of the protein aggregate in tissues, particularly the peripheral nervous system, causing polyneuropathy. Familial amyloid polyneuropathy (FAP) is the most common TTR disorder and, in 2014, was thought to affect 47 per 100,000 people in Europe. A mutation in the TTR gene of Val30Met is thought be the most common mutation, causing an estimated 50% of FAP cases. In the absence a liver transplant, the only known cure to date, the disease is usually fatal within a decade of diagnosis. The majority of cases are monogenic.

[1448] In mouse models of ATTR, the TTR gene may be edited in a dose dependent manner by the delivery of CRISPR/Cas9. In some embodiments, the C2c1 is provided as mRNA. In some embodiments, C2c1 mRNA and guide RNA are packaged in LNPs. A system comprising C2c1 mRNA and guide RNA packaged in LNPs achieved up to 60% editing efficiency in the liver, with serum TTR levels being reduced by up to 80%. In some embodiments, therefore, Transthyretin is targeted, in particular correcting for the Val30Met mutation. In some embodiments, therefore, ATTR is treated.

### Alpha-1 Antitrypsin Deficiency

[1449] Alpha-1 Antitrypsin (A1AT) is a protein produced in the liver which primarily functions to decrease the activity of neutrophil elastase, an enzyme which degrades connective tissue, in the lungs. Alpha-1 Antitrypsin Deficiency (ATTD) is a disease caused by mutation of the SERPINA1 gene, which encodes A1AT. Impaired production of A1AT leads to a gradual degradation of the connective tissue of the lung resulting in emphysema like symptoms.

[1450] Several mutations can cause ATTD, though the most common mutations are Glu342Lys (referred to as Z allele, wild-type is referred to as M) or Glu264Val (referred to as the S allele), and each allele contributes equally to the disease state, with two affected alleles resulting in more pronounced pathophysiology. These results not only resulted in degradation of the connective tissue of sensitive organs, such as the lung, but accumulation of the mutants in the liver can result in proteotoxicity. Current treatments focus on the replacement of A1AT by injection of protein retrieved from donated human plasma. In severe cases a lung and/or liver transplant may be considered.

[1451] The common variants of the disease are again monogenic. In some embodiments, the SERPINA1 gene is targeted. In some embodiments, the Glu342Lys mutation (referred to as Z allele, wild-type is referred to as M) or the Glu264Val mutation (referred to as the S allele) are corrected for. In some embodiments, therefore, the faulty gene would require replacement by the wild-type functioning gene. In some embodiments, a knockout and repair approach is required, so a repair template is provided. In the case of bi-allelic mutations, in some embodiments only one guide RNA would be required for homozygous mutations, but in the case of heterozygous mutations two guide RNAs may be required. Delivery is, in some embodiments, to the lung or liver.

### Inborn Errors of Metabolism

[1452] Inborn errors of metabolism (IEMs) are an umbrella group of diseases which affect metabolic processes. In some embodiments, an IEM is to be treated. The majority of these diseases are monogenic in nature (e.g. phenylketonuria) and the pathophysiology results from either the abnormal accumulation of substances which are inherently toxic, or mutations which result in an inability to synthesize essential substances. Depending on the nature of the IEM, CRISPR/C2c1 may be used to facilitate a knock-out alone, or in combination with replacement of a faulty gene via a repair template. Exemplary diseases that may benefit from CRISPR/C2c1 technology are, in some embodiments: primary hyperoxaluria type 1 (PH), argininosuccinic lyase deficiency, ornithine transcarbamylase deficiency, phenylketonuria, or PKU, and maple syrup urine disease.

### Treating Epithelial and Lung Diseases

[1453] The present invention also contemplates delivering the CRISPR-Cas system described herein, e.g. C2c1 effector protein systems, to one or both lungs.

[1454] Although AAV-2-based vectors were originally proposed for CFTR delivery to CF airways, other serotypes such as AAV-1, AAV-5, AAV-6, and AAV-9 exhibit improved gene transfer efficiency in a variety of models of the lung epithelium (see, e.g., Li et al., Molecular Therapy, vol. 17 no. 12, 2067-277 December 2009). AAV-1 was demonstrated to be ˜100-fold more efficient than AAV-2 and AAV-5 at transducing human airway epithelial cells in vitro, 5 although AAV-1 transduced murine tracheal airway epithelia in vivo with an efficiency equal to that of AAV-5. Other studies have shown that AAV-5 is 50-fold more efficient than AAV-2 at gene delivery to human airway epithelium (HAE) in vitro and significantly more efficient in the mouse lung airway epithelium in vivo. AAV-6 has also been shown to be more efficient than AAV-2 in human airway epithelial cells in vitro and murine airways in vivo.8 The more recent isolate, AAV-9, was shown to display greater gene transfer efficiency than AAV-5 in murine nasal and alveolar epithelia in vivo with gene expression detected for over 9 months suggesting AAV may enable long-term gene expression in vivo, a desirable property for a CFTR gene delivery vector. Furthermore, it was demonstrated that AAV-9 could be readministered to the murine lung with no loss of CFTR expression and minimal immune consequences. CF and non-CF HAE cultures may be inoculated on the apical surface with 100 1 of AAV vectors for hours (see, e.g., Li et al., Molecular Therapy, vol. 17 no. 12, 2067-277 December 2009). The MOI may vary from 1×103 to 4×105 vector genomes/cell, depending on virus concentration and purposes of the experiments. The above cited vectors are contemplated for the delivery and/or administration of the invention.

[1455] Zamora et al. (Am J Respir Crit Care Med Vol 183. pp 531-538, 2011) reported an example of the application of an RNA interference therapeutic to the treatment of human infectious disease and also a randomized trial of an antiviral drug in respiratory syncytial virus (RSV)-infected lung transplant recipients. Zamora et al. performed a randomized, double-blind, placebocontrolled trial in LTX recipients with RSV respiratory tract infection. Patients were permitted to receive standard of care for RSV. Aerosolized ALN-RSVO1 (0.6 mg/kg) or placebo was administered daily for 3 days. This study demonstrates that an RNAi therapeutic targeting RSV can be safely administered to LTX recipients with RSV infection. Three daily doses of ALN-RSVO1 did not result in any exacerbation of respiratory tract symptoms or impairment of lung function and did not exhibit any systemic proinflammatory effects, such as induction of cytokines or CRP. Pharmacokinetics showed only low, transient systemic exposure after inhalation, consistent with preclinical animal data showing that ALN-RSVO1, administered intravenously or by inhalation, is rapidly cleared from the circulation through exonuclease mediated digestion and renal excretion. The method of Zamora et al. may be applied to the nucleic acid-targeting system of the present invention and an aerosolized CRISPR Cas, for example with a dosage of 0.6 mg/kg, may be contemplated for the present invention.

[1456] Subjects treated for a lung disease may for example receive pharmaceutically effective amount of aerosolized AAV vector system per lung endobronchially delivered while spontaneously breathing. As such, aerosolized delivery is preferred for AAV delivery in general. An adenovirus or an AAV particle may be used for delivery. Suitable gene constructs, each operably linked to one or more regulatory sequences, may be cloned into the delivery vector. In this instance, the following constructs are provided as examples: Cbh or EF1α promoter for Cas (C2c1), U6 or H1 promoter for guide RNA): A preferred arrangement is to use a CFTRdelta508 targeting guide, a repair template for deltaF508 mutation and a codon optimized C2c1 enzyme, with optionally one or more nuclear localization signal or sequence(s) (NLS(s)), e.g., two (2) NLSs. Constructs without NLS are also envisaged.

[1457] Treating Diseases of the Muscular System

[1458] The present invention also contemplates delivering the CRISPR-Cas system described herein, e.g. C2c1 effector protein systems, to muscle(s).

[1459] Bortolanza et al. (Molecular Therapy vol. 19 no. 11, 2055-264 November 2011) shows that systemic delivery of RNA interference expression cassettes in the FRG1 mouse, after the onset of facioscapulohumeral muscular dystrophy (FSHD), led to a dose-dependent long-term FRG1 knockdown without signs of toxicity. Bortolanza et al. found that a single intravenous injection of 5×1012 vg of rAAV6-sh1FRG1 rescues muscle histopathology and muscle function of FRG1 mice. In detail, 200 containing 2×1012 or 5×1012 vg of vector in physiological solution were injected into the tail vein using a 25-gauge Terumo syringe. The method of Bortolanza et al. may be applied to an AAV expressing CRISPR Cas and injected into humans at a dosage of about 2×1015 or 2×1016 vg of vector.

[1460] Dumonceaux et al. (Molecular Therapy vol. 18 no. 5, 881-887 May 2010) inhibit the myostatin pathway using the technique of RNA interference directed against the myostatin receptor AcvRIIb mRNA (sh-AcvRIIb). The restoration of a quasi-dystrophin was mediated by the vectorized U7 exon-skipping technique (U7-DYS). Adeno-associated vectors carrying either the sh-AcvrIIb construct alone, the U7-DYS construct alone, or a combination of both constructs were injected in the tibialis anterior (TA) muscle of dystrophic mdx mice. The injections were performed with 1011 AAV viral genomes. The method of Dumonceaux et al. may be applied to an AAV expressing CRISPR Cas and injected into humans, for example, at a dosage of about 1014 to about 1015 vg of vector.

[1461] Kinouchi et al. (Gene Therapy (2008) 15, 1126-1130) report the effectiveness of in vivo siRNA delivery into skeletal muscles of normal or diseased mice through particle formation of chemically unmodified siRNAs with atelocollagen (ATCOL). ATCOL-mediated local application of siRNA targeting myostatin, a negative regulator of skeletal muscle growth, in mouse skeletal muscles or intravenously, caused a marked increase in the muscle mass within a few weeks after application. These results imply that ATCOL-mediated application of siRNAs is a powerful tool for future therapeutic use for diseases including muscular atrophy. MstsiRNAs (final concentration, 10 mM) were mixed with ATCOL (final concentration for local administration, 0.5%) (AteloGene, Kohken, Tokyo, Japan) according to the manufacturer's instructions. After anesthesia of mice (20-week-old male C57BL/6) by Nembutal (25 mg/kg, i.p.), the Mst-siRNA/ATCOL complex was injected into the masseter and biceps femoris muscles. The method of Kinouchi et al. may be applied to CRISPR Cas and injected into a human, for example, at a dosage of about 500 to 1000 ml of a 40 M solution into the muscle. Hagstrom et al. (Molecular Therapy Vol. 10, No. 2, August 2004) describe an intravascular, nonviral methodology that enables efficient and repeatable delivery of nucleic acids to muscle cells (myofibers) throughout the limb muscles of mammals. The procedure involves the injection of naked plasmid DNA or siRNA into a distal vein of a limb that is transiently isolated by a tourniquet or blood pressure cuff. Nucleic acid delivery to myofibers is facilitated by its rapid injection in sufficient volume to enable extravasation of the nucleic acid solution into muscle tissue. High levels of transgene expression in skeletal muscle were achieved in both small and large animals with minimal toxicity. Evidence of siRNA delivery to limb muscle was also obtained. For plasmid DNA intravenous injection into a rhesus monkey, a three-way stopcock was connected to two syringe pumps (Model PHD 2000; Harvard Instruments), each loaded with a single syringe. Five minutes after a papaverine injection, pDNA (15.5 to 25.7 mg in 40-100 ml saline) was injected at a rate of 1.7 or 2.0 ml/s. This could be scaled up for plasmid DNA expressing CRISPR Cas of the present invention with an injection of about 300 to 500 mg in 800 to 2000 ml saline for a human. For adenoviral vector injections into a rat, 2×10⁹ infectious particles were injected in 3 ml of normal saline solution (NSS). This could be scaled up for an adenoviral vector expressing CRISPR Cas of the present invention with an injection of about 1×1013 infectious particles were injected in 10 liters of NSS for a human. For siRNA, a rat was injected into the great saphenous vein with 12.5 g of a siRNA and a primate was injected into the great saphenous vein with 750 g of a siRNA. This could be scaled up for a CRISPR Cas of the present invention, for example, with an injection of about 15 to about 50 mg into the great saphenous vein of a human.

[1462] See also, for example, WO2013163628 A2, Genetic Correction of Mutated Genes, published application of Duke University describes efforts to correct, for example, a frameshift mutation which causes a premature stop codon and a truncated gene product that can be corrected via nuclease mediated non-homologous end joining such as those responsible for Duchenne Muscular Dystrophy, (“DMD”) a recessive, fatal, X-linked disorder that results in muscle degeneration due to mutations in the dystrophin gene. The majority of dystrophin mutations that cause DMD are deletions of exons that disrupt the reading frame and cause premature translation termination in the dystrophin gene. Dystrophin is a cytoplasmic protein that provides structural stability to the dystroglycan complex of the cell membrane that is responsible for regulating muscle cell integrity and function. The dystrophin gene or “DMD gene” as used interchangeably herein is 2.2 megabases at locus Xp21. The primary transcription measures about 2,400 kb with the mature mRNA being about 14 kb. 79 exons code for the protein which is over 3500 amino acids. Exon 51 is frequently adjacent to frame-disrupting deletions in DMD patients and has been targeted in clinical trials for oligonucleotide-based exon skipping. A clinical trial for the exon 51 skipping compound eteplirsen recently reported a significant functional benefit across 48 weeks, with an average of 47% dystrophin positive fibers compared to baseline. Mutations in exon 51 are ideally suited for permanent correction by NHEJ-based genome editing.

[1463] The methods of US Patent Publication No. 20130145487 assigned to Cellectis, which relates to meganuclease variants to cleave a target sequence from the human dystrophin gene (DMD), may also be modified to for the nucleic acid-targeting system of the present invention. In preferred embodiments, the nucleic targeting system comprises a CRISPR-C2c1 system. With respect to the C2c1 protein the CRISPR-C2c1 system may recognize a PAM sequence that is a T-rich sequence. In some embodiments, the PAM sequence is 5′ TTN 3′ or 5′ ATTN 3′, wherein N is any nucleotide. In some embodiments, the CRISPR-C2c1 system introduces one or more staggered double strand breaks (DSBs) with a 5′ overhang to the target gene. In particular embodiments, the 5′ overhang is 7 nt. In some embodiments, the CRISPR-C2c1 system introduces a template DNA sequence at the staggered DSB via HR or NHEJ. In some particular embodiments, the CRISPR-C2c1 system comprises a catalytically inactivated C2c1 protein associated with a functional domain that modifies the target gene. In a particular embodiment, the CRISPR-C2c1 system introduces a single mutation. In another particular embodiment, the CRISPR-C2c1 system introduces a single nucleotide modification to the transcript of the target gene.

### Treating Diseases of the Skin

[1464] The present invention also contemplates delivering the CRISPR-Cas system described herein, e.g. C2c1 effector protein systems, to the skin.

[1465] Hickerson et al. (Molecular Therapy-Nucleic Acids (2013) 2, e129) relates to a motorized microneedle array skin delivery device for delivering self-delivery (sd)-siRNA to human and murine skin. The primary challenge to translating siRNA-based skin therapeutics to the clinic is the development of effective delivery systems. Substantial effort has been invested in a variety of skin delivery technologies with limited success. In a clinical study in which skin was treated with siRNA, the exquisite pain associated with the hypodermic needle injection precluded enrollment of additional patients in the trial, highlighting the need for improved, more “patient-friendly” (i.e., little or no pain) delivery approaches. Microneedles represent an efficient way to deliver large charged cargos including siRNAs across the primary barrier, the stratum corneum, and are generally regarded as less painful than conventional hypodermic needles. Motorized “stamp type” microneedle devices, including the motorized microneedle array (MMNA) device used by Hickerson et al., have been shown to be safe in hairless mice studies and cause little or no pain as evidenced by (i) widespread use in the cosmetic industry and (ii) limited testing in which nearly all volunteers found use of the device to be much less painful than a flushot, suggesting siRNA delivery using this device will result in much less pain than was experienced in the previous clinical trial using hypodermic needle injections. The MMNA device (marketed as Triple-M or Tri-M by Bomtech Electronic Co, Seoul, South Korea) was adapted for delivery of siRNA to mouse and human skin. sd-siRNA solution (up to 300 of 0.1 mg/ml RNA) was introduced into the chamber of the disposable Tri-M needle cartridge (Bomtech), which was set to a depth of 0.1 mm. For treating human skin, deidentified skin (obtained immediately following surgical procedures) was manually stretched and pinned to a cork platform before treatment. All intradermal injections were performed using an insulin syringe with a 28-gauge 0.5-inch needle. The MMNA device and method of Hickerson et al. could be used and/or adapted to deliver the CRISPR Cas of the present invention, for example, at a dosage of up to 300 of 0.1 mg/ml CRISPR Cas to the skin.

[1466] Leachman et al. (Molecular Therapy, vol. 18 no. 2, 442-446 February 2010) relates to a phase Ib clinical trial for treatment of a rare skin disorder pachyonychia congenita (PC), an autosomal dominant syndrome that includes a disabling plantar keratoderma, utilizing the first short-interfering RNA (siRNA)-based therapeutic for skin. This siRNA, called TD101, specifically and potently targets the keratin 6a (K6a) N171K mutant mRNA without affecting wild-type K6a mRNA.

[1467] Zheng et al. (PNAS, Jul. 24, 2012, vol. 109, no. 30, 11975-11980) show that spherical nucleic acid particle conjugates (SNA-NCs), gold cores surrounded by a dense shell of highly oriented, covalently immobilized siRNA, freely penetrate almost 100% of keratinocytes in vitro, mouse skin, and human epidermis within hours after application. Zheng et al. demonstrated that a single application of 25 nM epidermal growth factor receptor (EGFR) SNA-NCs for 60 h demonstrate effective gene knockdown in human skin. A similar dosage may be contemplated for CRISPR Cas immobilized in SNA-NCs for administration to the skin. The methods of Zheng et al., Leachman et al and Hickerson et al. may also be modified to for the nucleic acid-targeting system of the present invention. In preferred embodiments, the nucleic targeting system comprises a CRISPR-C2c1 system. With respect to the C2c1 protein the CRISPR-C2c1 system may recognize a PAM sequence that is a T-rich sequence. In some embodiments, the PAM sequence is 5′ TTN 3′ or 5′ ATTN 3′, wherein N is any nucleotide. In some embodiments, the CRISPR-C2c1 system introduces one or more staggered double strand breaks (DSBs) with a 5′ overhang to the target gene. In particular embodiments, the 5′ overhang is 7 nt. In some embodiments, the CRISPR-C2c1 system introduces a template DNA sequence at the staggered DSB via HR or NHEJ. In some particular embodiments, the CRISPR-C2c1 system comprises a catalytically inactivated C2c1 protein associated with a functional domain that modifies the target gene. In a particular embodiment, the CRISPR-C2c1 system introduces a single mutation. In another particular embodiment, the CRISPR-C2c1 system introduces a single nucleotide modification to the transcript of the target gene.

### Cancer

[1468] In some embodiments, the treatment, prophylaxis or diagnosis of cancer is provided. The target is preferably one or more of the FAS, BID, CTLA4, PDCD1, CBLB, PTPN6, TRAC or TRBC genes. The cancer may be one or more of lymphoma, chronic lymphocytic leukemia (CLL), B cell acute lymphocytic leukemia (B-ALL), acute lymphoblastic leukemia, acute myeloid leukemia, non-Hodgkin's lymphoma (NHL), diffuse large cell lymphoma (DLCL), multiple myeloma, renal cell carcinoma (RCC), neuroblastoma, colorectal cancer, Castration resistant prostate cancer, Metastatic Renal Cell Carcinoma, metastatic Non-small cell lung cancer, breast cancer, bladder cancer, ovarian cancer, melanoma, sarcoma, prostate cancer, lung cancer, esophageal cancer, hepatocellular carcinoma, pancreatic cancer, astrocytoma, mesothelioma, head and neck cancer, and medulloblastoma. This may be implemented with engineered chimeric antigen receptor (CAR) T cell. This is described in WO2015161276, the disclosure of which is hereby incorporated by reference and described herein below.

[1469] Treatments of multiple cancer, including esophageal cancer, invasive bladder cancer, hormone refractory prostate cancer, metastatic renal cell carcinoma, metastatic non-small cell lung cancer, stage IV gastric carcinoma, stage IV nasopharynegeal carcinoma, stage IV t-cell lymphoma, and Epstei-Barr virus associated malignancies with a CRISPR-Cas9 system by generating PD-1 knock out T cells were proposed and described. See Niu et al. Cell 2014, 156(4): 836-43; Rosenberg et al, Science 2015, 348 (6230): 62-8; Sharma et al, Cell 2015, 161(2): 205-14; Bidnur et al, Bladder Cancer, 2016, 2(1): 15-25; Kim et al, Investig Clin Urol. 2016, 57 Suppl 1: S98-S105; Argon-Ching et al, Future Oncol., 2016, 12(17): 2049-58; Festino et al, Drugs 2016, 76(9): 925-45; Zibelman et al, Future Oncl., 2016, 12(19): 2227-42; Doni et al., J. Urol., 2017 197(1): 14-22; Yi et al, Biochim Biophys Acta., 2016, 1866(2): 197-207; Taube et al, Oncoimmunology, 2014, 3(11)L e963413; Yatsuda et al, Nihon Rinsho, 2014, 72(12): 2174-8; Modena et al. Oncol Rev. 2016, 10(1): 293; Bishop et al. Oncotarget, 2015, 6(1): 234-42; Gandini et al, Crit Rev Oncol Hematol. 2016, 100:88-98; Koshikin et al, Expert Opin Pharmacother. 2016 17(9):1225-32; Hofmann et al., Eur J Cancer. 2016, 60:190-209; Gunturi et al, Curr Treat Options Oncol. 2014, 15(1):137-46; Bockorny et al., Expert Opin Biol Ther. 2013, 13(6):911-25; Garon et al, N Engl J Med 2015, 372(21)L 2018-28; Brahmer et al, N Eng J Med, 2015 373(2): 123-35; Borghaei et al, N Engl JH Med 2015, 373(17): 1627-39; Kim et al, Gastroenterology, 2015 148(1): 137-147; Quan et al, PloS One, 2015, 10(9): 30136476; Louis et al, J Immunother., 2010, 33(9): 983-90; Lloyd et al., Frot Immunol., 2013, 4:221; Su et al, Sci Rep. 2016, 6: 20070. Peripheral blood lymphocytes will be collected and Programmed cell death protein 1(PDCD1) gene will be knocked out by CRISPR Cas9 in the laboratory (PD-1 Knockout T cells). The lymphocytes are selected and expanded ex vivo and infused back into patients. A total of 2×10\hat{ }7/kg PD-1 Knockout T cells are infused in one cycle. Each cycle is divided into three administrations, with 20% infused in the first administration, 30% in the second, and the remaining 50% in the third. For advanced esophageal cancer and invasive muscle bladder cancer, cyclophosphamide at 20 mg/kg single dose are administered 3 days i.v. before cell infusion. Interleukin-2 (IL-2) are administered in the following 5 days, 720000 international unit (IU)/Kg/day (if tolerant). Patients receive a total of 2, 3, 4 cycles of treatment.

[1470] Target genes suitable for the treatment or prophylaxis of cancer may include, in some embodiments, those described in WO2015048577 the disclosure of which is hereby incorporated by reference. The methods of WO2015161276 and WO2015048577 may also be modified to for the nucleic acid-targeting system of the present invention.

[1471] The CRISPR-C2c1 system disclosed herein may be applied with methods described above in cancer treatment. In preferred embodiments, the nucleic targeting system comprises a CRISPR-C2c1 system. With respect to the C2c1 protein the CRISPR-C2c1 system may recognize a PAM sequence that is a T-rich sequence. In some embodiments, the PAM sequence is 5′ TTN 3′ or 5′ ATTN 3′, wherein N is any nucleotide. In some embodiments, the CRISPR-C2c1 system introduces one or more staggered double strand breaks (DSBs) with a 5′ overhang to the target gene. In particular embodiments, the 5′ overhang is 7 nt. In some particular embodiments, the CRISPR-C2c1 system comprises a catalytically inactivated C2c1 protein associated with a functional domain that modifies the target gene. In a particular embodiment, the CRISPR-C2c1 system introduces a single mutation. In another particular embodiment, the CRISPR-C2c1 system introduces a single nucleotide modification to the transcript of the target gene. C2c1 creates double strand breaks at the distal end of PAM, in contrast to cleavage at the proximal end of PAM created by Cas9 (Jinek et al., 2012; Cong et al., 2013). It is proposed that C2c1 mutated target sequences may be susceptible to repeated cleavage by a single gRNA, hence promoting C2c1's application in HDR mediated genome editing (Front Plant Sci. 2016 Nov. 14; 7:1683). In certain embodiments, the locus of interest is modified by the CRISPR-C2c1 complex via homology directed repair (HR or HDR). In certain embodiments, the locus of interest is modified by the CRISPR-C2c1 complex independent of HR. In certain embodiments, the locus of interest is modified by the CRISPR-C2c1 complex via non-homologous end joining (NHEJ).

[1472] C2c1 generates a staggered cut with a 5′ overhang, in contrast to the blunt ends generated by Cas9 (Garneau et al., Nature. 2010; 468:67-71; Gasiunas et al., Proc Natl Acad Sci USA. 2012; 109:E2579-2586). This structure of the cleavage product could be particularly advantageous for facilitating non-homologous end joining (NHEJ)-based gene insertion into the mammalian genome (Maresca et al., Genome research. 2013; 23:539-546). In some embodiments, the CRISPR-C2c1 system introduces a exogenous DNA insertion at the staggered DSB via HR or NHEJ. In certain embodiments, the locus of interest is modified by the CRISPR-C2c1 complex by inserting, or “knocking-in” a template DNA sequence. In particular embodiments, the DNA insert is designed to integrate into the genome in the proper orientation. In preferred embodiments, the locus of interest is modified by the CRISPR-C2c1 system in non-dividing cells, where genome editing via homology-directed repair (HDR) mechanisms are especially challenging (Chan et al., Nucleic acids research. 2011; 39:5955-5966). Maresca et al. (Genome Res. 2013 March; 23(3): 539-546) described a method of site directed, precise insertion applicable with zinc finger nucleases (ZFNs) and Tale nucleases (TALENs) wherein short, double-stranded DNAs with 5′ overhangs were ligated to complementary ends, which allowed precise insertion of 15-kb exogeneous expression cassette at defined locus in human cell lines. He et al. (Nucleic Acids Res. 2016 May 19; 44(9)) described CRISPR/Cas9-induced site-specific knock-in of a 4.6 kb promoterless ires-eGFP fragment into the GAPDH locus yielded up to 20% GFP+ cells in somatic LO2 cells, and 1.70% GFP+ cells in human embryonic stem cells mediated by the NHEJ pathway and also reported that the NHEJ-based knock-in is more efficient than HDR-mediated gene targeting in all human cell types examined. Because C2c1 generates a staggered cut with a 5′ overhang, one with ordinary skill in the art could use the methods similar to that as described in Meresca et al. and He et al. to generate exogenous DNA insertions at a locus of interest with the CRISPR-C2c1 system disclosed herein.

[1473] In certain embodiments, the locus of interest is first modified by the CRISPR-C2c1 system at the distal end of the PAM sequence, and further modified by the CRISPR-C2c1 system near the PAM sequence and repaired via HDR. In certain embodiments, the locus of interest is modified by the CRISPR-C2c1 system by introducing a mutation, deletion, or insertion of exogenous DNA sequence via HDR. In some embodiments, the locus of interest is modified by the CRISPR-C2c1 system by introducing a mutation, deletion, or insertion of exogenous DNA sequence via NHEJ. In preferred embodiments, the exogenous DNA is flanked by single guide DNA (sgDNA)-PAM sequences on both 3′ and 5′ ends. In preferred embodiments, the exogenous DNA is released after CRISPR-C2c1 cleavage. See Zhang et al., Genome Biology 201718:35; He et al., Nucleic Acids Research, 44: 9, 2016.

### Usher Syndrome or Retinitis Pigmentosa-39

[1474] In some embodiments, the treatment, prophylaxis or diagnosis of Usher Syndrome or retinitis pigmentosa-39 is provided. The target is preferably the USH2A gene. In some embodiments, correction of a G deletion at position 2299 (2299delG) is provided. This is described in WO2015134812A1, the disclosure of which is hereby incorporated by reference. With respect to the C2c1 protein the CRISPR-C2c1 system may recognize a PAM sequence that is a T-rich sequence. In some embodiments, the PAM sequence is 5′ TTN 3′ or 5′ ATTN 3′, wherein N is any nucleotide. In some embodiments, the CRISPR-C2c1 system introduces one or more staggered double strand breaks (DSBs) with a 5′ overhang to the target gene. In particular embodiments, the 5′ overhang is 7 nt. In some embodiments, the CRISPR-C2c1 system introduces a template DNA sequence at the staggered DSB via HR or NHEJ. In some particular embodiments, the CRISPR-C2c1 system comprises a catalytically inactivated C2c1 protein associated with a functional domain that modifies the target gene. In a particular embodiment, the CRISPR-C2c1 system introduces a single mutation. In another particular embodiment, the CRISPR-C2c1 system introduces a single nucleotide modification to the transcript of the target gene.

### Autoimmune and Inflammatory Disorders

[1475] In some embodiments, autoimmune and inflammatory disorders are treated. These include Multiple Sclerosis (MS) or Rheumatoid Arthritis (RA), for example.

### Cystic Fibrosis (CF)

[1476] In some embodiments, the treatment, prophylaxis or diagnosis of cystic fibrosis is provided. The target is preferably the SCNN1A or the CFTR gene. This is described in WO2015157070, the disclosure of which is hereby incorporated by reference.

[1477] Schwank et al. (Cell Stem Cell, 13:653-58, 2013) used CRISPR-Cas9 to correct a defect associated with cystic fibrosis in human stem cells. The team's target was the gene for an ion channel, cystic fibrosis transmembrane conductor receptor (CFTR). A deletion in CFTR causes the protein to misfold in cystic fibrosis patients. Using cultured intestinal stem cells developed from cell samples from two children with cystic fibrosis, Schwank et al. were able to correct the defect using CRISPR along with a donor plasmid containing the reparative sequence to be inserted. The researchers then grew the cells into intestinal “organoids,” or miniature guts, and showed that they functioned normally. In this case, about half of clonal organoids underwent the proper genetic correction.

[1478] In some embodiments, Cystic fibrosis is treated, for example. Delivery to the lungs is therefore preferred. The F508 mutation (delta-F508, full name CFTRAF508 or F508del-CFTR) is preferably corrected. In some embodiments, the targets may be ABCC7, CF or MRP7.

[1479] In another embodiment, the method of Patent Publication US20170022507 assigned to Editas medicine, which is related to Crispr-Cas related methods and compositions for treating cystic fibrosis may be modified for the CRISPR-Cas system disclosed in the present invention. With respect to the C2c1 protein the CRISPR-C2c1 system may recognize a PAM sequence that is a T-rich sequence. In some embodiments, the PAM sequence is 5′ TTN 3′ or 5′ ATTN 3′, wherein N is any nucleotide. In some embodiments, the CRISPR-C2c1 system introduces one or more staggered double strand breaks (DSBs) with a 5′ overhang to the target gene. In particular embodiments, the 5′ overhang is 7 nt. In some embodiments, the CRISPR-C2c1 system introduces a template DNA sequence at the staggered DSB via HR or NHEJ. In some particular embodiments, the CRISPR-C2c1 system comprises a catalytically inactivated C2c1 protein associated with a functional domain that modifies the target gene. In a particular embodiment, the CRISPR-C2c1 system introduces a single mutation. In another particular embodiment, the CRISPR-C2c1 system introduces a single nucleotide modification to the transcript of the target gene.

### Duchenne's Muscular Dystrophy

[1480] Duchenne's muscular dystrophy (DMD) is a recessive, sex-linked muscle wasting disease that affects approximately 1 in 5000 males at birth. Mutations of the dystrophin gene result in an absence of dystrophin in skeletal muscle, where it normally functions to connect the cytoskeleton of the muscle fiber to the basal lamina. The absence of dystrophin caused be these mutations results in excessive calcium entry into the soma which causes the mitochondria to rupture, destroying the cell. Current treatments are focused on easing the symptoms of DMD, and the average life expectancy is approximately 26 years.

[1481] CRISPR/Cas9 efficacy as a treatment for certain types of DMD has been demonstrated in mouse models. In one such study, the muscular dystrophy phenotype was partially corrected in the mouse by knocking-out a mutant exon resulting in a functional protein (see Nelson et al. (2016) Science, Long et al. (2016) Science, and Tabebordbar et al. (2016) Science).

[1482] In some embodiments, the method of Patent Publication WO2016161380 assigned to Editas Medine, which is related to Crispr related method of treating DMD may be modified for application of the CRISPR-Cas system of this invention. In some embodiments, DMD is treated. In some embodiments, delivery is to the muscle by injection. In some embodiments, the CRISPR protein is a C2c1, and the system comprises: I. a CRISPR-Cas system RNA polynucleotide sequence, wherein the polynucleotide sequence comprises: (a) a tracr RNA polynucleotide and a guide RNA polynucleotide capable of hybridizing to a target sequence, and (b) a direct repeat RNA polynucleotide, and II. a polynucleotide sequence encoding the C2c1, optionally comprising at least one or more nuclear localization sequences, wherein the direct repeat sequence hybridizes to the guide sequence and directs sequence-specific binding of a CRISPR complex to the target sequence, and wherein the CRISPR complex comprises the CRISPR protein complexed with (1) the guide sequence that is hybridized or hybridizable to the target sequence, and (2) the direct repeat sequence, and the polynucleotide sequence encoding a CRISPR protein is DNA or RNA.

[1483] In some embodiments, the CRISPR-C2c1 system recognizes T-rich PAMs. In particular embodiments, the PAM is 5′-TTN-3′ or 5′-ATTN-3′. In certain embodiments, the locus of interest is modified by the CRISPR-C2c1 complex by inserting, or “knocking-in” a template DNA sequence. In particular embodiments, the DNA insert is designed to integrate into the genome in the proper orientation. Maresca et al. (Genome Res. 2013 March; 23(3): 539-546) described a method of site directed, precise insertion applicable with zinc finger nucleases (ZFNs) and Tale nucleases (TALENs) wherein short, double-stranded DNAs with 5′ overhangs were ligated to complementary ends, which allowed precise insertion of 15-kb exogeneous expression cassette at defined locus in human cell lines. He et al. (Nucleic Acids Res. 2016 May 19; 44(9)) described CRISPR/Cas9-induced site-specific knock-in of a 4.6 kb promoterless ires-eGFP fragment into the GAPDH locus yielded up to 20% GFP+ cells in somatic LO2 cells, and 1.70% GFP+ cells in human embryonic stem cells mediated by the NHEJ pathway and also reported that the NHEJ-based knock-in is more efficient than HDR-mediated gene targeting in all human cell types examined. Because C2c1 generates a staggered cut with a 5′ overhang, one with ordinary skill in the art could use the methods similar to that as described in Meresca et al. and He et al. to generate exogenous DNA insertions at a locus of interest with the CRISPR-C2c1 system disclosed herein.

[1484] In certain embodiments, the locus of interest is first modified by the CRISPR-C2c1 system at the distal end of the PAM sequence, and further modified by the CRISPR-C2c1 system near the PAM sequence and repaired via HDR. In certain embodiments, the locus of interest is modified by the CRISPR-C2c1 system by introducing a mutation, deletion, or insertion of exogenous DNA sequence via HDR. In some embodiments, the locus of interest is modified by the CRISPR-C2c1 system by introducing a mutation, deletion, or insertion of exogenous DNA sequence via NHEJ. In preferred embodiments, the exogenous DNA is flanked by single guide DNA (sgDNA)-PAM sequences on both 3′ and 5′ ends. In preferred embodiments, the exogenous DNA is released after CRISPR-C2c1 cleavage.

Glycogen Storage Diseases, including 1a

[1485] Glycogen Storage Disease 1a is a genetic disease resulting from deficiency of the enzyme glucose-6-phosphatase. The deficiency impairs the ability of the liver to produce free glucose from glycogen and from gluconeogenesis. In some embodiments, the gene encoding the glucose-6-phosphatase enzyme is targeted. In some embodiments, Glycogen Storage Disease 1a is treated. In some embodiments, delivery is to the liver by encapsulation of the C2c1 (in protein or mRNA form) in a lipid particle, such as an LNP. With respect to the C2c1 protein the CRISPR-C2c1 system may recognize a PAM sequence that is a T-rich sequence. In some embodiments, the PAM sequence is 5′ TTN 3′ or 5′ ATTN 3′, wherein N is any nucleotide. In some embodiments, the CRISPR-C2c1 system introduces one or more staggered double strand breaks (DSBs) with a 5′ overhang to the target gene. In particular embodiments, the 5′ overhang is 7 nt. In some embodiments, the CRISPR-C2c1 system introduces a template DNA sequence at the staggered DSB via HR or NHEJ. In some particular embodiments, the CRISPR-C2c1 system comprises a catalytically inactivated C2c1 protein associated with a functional domain that modifies the target gene. In a particular embodiment, the CRISPR-C2c1 system introduces a single mutation. In another particular embodiment, the CRISPR-C2c1 system introduces a single nucleotide modification to the transcript of the target gene.

[1486] In some embodiments, Glycogen Storage Diseases, including 1a, are targeted and preferably treated, for example by targeting polynucleotides associated with the condition/disease/infection. The associated polynucleotides include DNA, which may include genes (where genes include any coding sequence and regulatory elements such as enhancers or promoters). In some embodiments, the associated polynucleotides may include the SLC2A2, GLUT2, G6PC, G6PT, G6PT1, GAA, LAMP2, LAMPB, AGL, GDE, GBE1, GYS2, PYGL, or PFKM genes.

### Hurler Syndrome

[1487] Hurler syndrome, also known as mucopolysaccharidosis type I (MPS I), Hurler's disease, is a genetic disorder that results in the buildup of glycosaminoglycans (formerly known as mucopolysaccharides) due to a deficiency of alpha-L iduronidase, an enzyme responsible for the degradation of mucopolysaccharides in lysosomes. Hurler syndrome is often classified as a lysosomal storage disease, and is clinically related to Hunter Syndrome. Hunter syndrome is X-linked while Hurler syndrome is autosomal recessive. MPS I is divided into three subtypes based on severity of symptoms. All three types result from an absence of, or insufficient levels of, the enzyme α-L-iduronidase. MPS I H or Hurler syndrome is the most severe of the MPS I subtypes. The other two types are MPS I S or Scheie syndrome and MPS I H-S or Hurler-Scheie syndrome. Children born to an MPS I parent carry a defective IDUA gene, which has been mapped to the 4p16.3 site on chromosome 4. The gene is named IDUA because of its iduronidase enzyme protein product. As of 2001, 52 different mutations in the IDUA gene have been shown to cause Hurler syndrome. Successful treatment of the mouse, dog, and cat models of MPS I by delivery of the iduronidase gene through retroviral, lentiviral, AAV, and even nonviral vectors.

[1488] In some embodiments, the α-L-iduronidase gene is targeted and a repair template preferably provided. In some embodiments, the CRISPR protein is a C2c1, and the system comprises: I. a CRISPR-Cas system RNA polynucleotide sequence, wherein the polynucleotide sequence comprises: (a) a guide RNA polynucleotide capable of hybridizing to a target sequence, and (b) a direct repeat RNA polynucleotide, and II. a polynucleotide sequence encoding the C2c1, optionally comprising at least one or more nuclear localization sequences, wherein the direct repeat sequence hybridizes to the guide sequence and directs sequence-specific binding of a CRISPR complex to the target sequence, and wherein the CRISPR complex comprises the CRISPR protein complexed with (1) the guide sequence that is hybridized or hybridizable to the target sequence, and (2) the direct repeat sequence, and the polynucleotide sequence encoding a CRISPR protein is DNA or RNA. In certain embodiments, the C2c1 effector protein recognizes T-rich PAMs. In particular embodiments, the PAM is 5′-TTN-3′ or 5′-ATTN-3′. In certain embodiments, the locus of interest related to MPS I is modified by the CRISPR-C2c1 complex by creating staggered cuts with 5′ overhangs. In some embodiments, the 5′ overhang is 7 nt. In some embodiments, the staggered cuts are followed by NHEJ or HDR. In certain embodiments, the locus of interest is modified by the CRISPR-C2c1 complex by inserting, or “knocking-in” a template DNA sequence. In particular embodiments, the DNA insert is designed to integrate into the genome in the proper orientation. Maresca et al. (Genome Res. 2013 March; 23(3): 539-546) described a method of site directed, precise insertion applicable with zinc finger nucleases (ZFNs) and Tale nucleases (TALENs) wherein short, double-stranded DNAs with 5′ overhangs were ligated to complementary ends, which allowed precise insertion of 15-kb exogeneous expression cassette at defined locus in human cell lines. He et al. (Nucleic Acids Res. 2016 May 19; 44(9)) described CRISPR/Cas9-induced site-specific knock-in of a 4.6 kb promoterless ires-eGFP fragment into the GAPDH locus yielded up to 20% GFP+ cells in somatic LO2 cells, and 1.70% GFP+ cells in human embryonic stem cells mediated by the NHEJ pathway and also reported that the NHEJ-based knock-in is more efficient than HDR-mediated gene targeting in all human cell types examined. Because C2c1 generates a staggered cut with a 5′ overhang, one with ordinary skill in the art could use the methods similar to that as described in Meresca et al. and He et al. to generate exogenous DNA insertions at a locus of interest with the CRISPR-C2c1 system disclosed herein.

[1489] In certain embodiments, the locus of interest is first modified by the CRISPR-C2c1 system at the distal end of the PAM sequence, and further modified by the CRISPR-C2c1 system near the PAM sequence and repaired via HDR. In certain embodiments, the locus of interest is modified by the CRISPR-C2c1 system by introducing a mutation, deletion, or insertion of exogenous DNA sequence via HDR. In some embodiments, the locus of interest is modified by the CRISPR-C2c1 system by introducing a mutation, deletion, or insertion of exogenous DNA sequence via NHEJ. In preferred embodiments, the exogenous DNA is flanked by single guide DNA (sgDNA)-PAM sequences on both 3′ and 5′ ends. In preferred embodiments, the exogenous DNA is released after CRISPR-C2c1 cleavage.

### HIV and AIDS

[1490] In some embodiments, the treatment, prophylaxis or diagnosis of HIV and AIDS is provided. The target is preferably the CCR5 gene in HIV. This is described in WO2015148670A1, the disclosure of which is hereby incorporated by reference. With respect to the C2c1 protein the CRISPR-C2c1 system may recognize a PAM sequence that is a T-rich sequence. In some embodiments, the PAM sequence is 5′ TTN 3′ or 5′ ATTN 3′, wherein N is any nucleotide. In some embodiments, the CRISPR-C2c1 system introduces one or more staggered double strand breaks (DSBs) with a 5′ overhang to the target gene. In particular embodiments, the 5′ overhang is 7 nt. In some embodiments, the CRISPR-C2c1 system introduces a template DNA sequence at the staggered DSB via HR or NHEJ. In some particular embodiments, the CRISPR-C2c1 system comprises a catalytically inactivated C2c1 protein associated with a functional domain that modifies the target gene. In a particular embodiment, the CRISPR-C2c1 system introduces a single mutation. In another particular embodiment, the CRISPR-C2c1 system introduces a single nucleotide modification to the transcript of the target gene.

### Beta Thalassaemia and Sickle Cell Disease (SCD)

[1491] In some embodiments, the treatment, prophylaxis or diagnosis of Beta Thalassaemia is provided. The target is preferably the BCL11A gene. This is described in WO2015148860, the disclosure of which is hereby incorporated by reference. With respect to the C2c1 protein the CRISPR-C2c1 system may recognize a PAM sequence that is a T-rich sequence. In some embodiments, the PAM sequence is 5′ TTN 3′ or 5′ ATTN 3′, wherein N is any nucleotide. In some embodiments, the CRISPR-C2c1 system introduces one or more staggered double strand breaks (DSBs) with a 5′ overhang to the target gene. In particular embodiments, the 5′ overhang is 7 nt. In some embodiments, the CRISPR-C2c1 system introduces a template DNA sequence at the staggered DSB via HR or NHEJ. In some particular embodiments, the CRISPR-C2c1 system comprises a catalytically inactivated C2c1 protein associated with a functional domain that modifies the target gene. In a particular embodiment, the CRISPR-C2c1 system introduces a single mutation. In another particular embodiment, the CRISPR-C2c1 system introduces a single nucleotide modification to the transcript of the target gene.

[1492] In some embodiments, the treatment, prophylaxis or diagnosis of Sickle Cell Disease (SCD) is provided. The target is preferably the HBB or BCL11A gene. This is described in WO2015148863, the disclosure of which is hereby incorporated by reference. With respect to the C2c1 protein the CRISPR-C2c1 system may recognize a PAM sequence that is a T-rich sequence. In some embodiments, the PAM sequence is 5′ TTN 3′ or 5′ ATTN 3′, wherein N is any nucleotide. In some embodiments, the CRISPR-C2c1 system introduces one or more staggered double strand breaks (DSBs) with a 5′ overhang to the target gene. In particular embodiments, the 5′ overhang is 7 nt. In some embodiments, the CRISPR-C2c1 system introduces a template DNA sequence at the staggered DSB via HR or NHEJ. In some particular embodiments, the CRISPR-C2c1 system comprises a catalytically inactivated C2c1 protein associated with a functional domain that modifies the target gene. In a particular embodiment, the CRISPR-C2c1 system introduces a single mutation. In another particular embodiment, the CRISPR-C2c1 system introduces a single nucleotide modification to the transcript of the target gene. In certain embodiments, the locus of interest is modified by the CRISPR-C2c1 complex by inserting, or “knocking-in” a template DNA sequence. In particular embodiments, the DNA insert is designed to integrate into the genome in the proper orientation. In preferred embodiments, the locus of interest is modified by the CRISPR-C2c1 system in non-dividing cells, where genome editing via homology-directed repair (HDR) mechanisms are especially challenging (Chan et al., Nucleic acids research. 2011; 39:5955-5966). Maresca et al. (Genome Res. 2013 March; 23(3): 539-546) described a method of site directed, precise insertion applicable with zinc finger nucleases (ZFNs) and Tale nucleases (TALENs) wherein short, double-stranded DNAs with 5′ overhangs were ligated to complementary ends, which allowed precise insertion of 15-kb exogeneous expression cassette at defined locus in human cell lines. He et al. (Nucleic Acids Res. 2016 May 19; 44(9)) described CRISPR/Cas9-induced site-specific knock-in of a 4.6 kb promoterless ires-eGFP fragment into the GAPDH locus yielded up to 20% GFP+ cells in somatic LO2 cells, and 1.70% GFP+ cells in human embryonic stem cells mediated by the NHEJ pathway and also reported that the NHEJ-based knock-in is more efficient than HDR-mediated gene targeting in all human cell types examined. Because C2c1 generates a staggered cut with a 5′ overhang, one with ordinary skill in the art could use the methods similar to that as described in Meresca et al. and He et al. to generate exogenous DNA insertions at a locus of interest with the CRISPR-C2c1 system disclosed herein.

[1493] In certain embodiments, the locus of interest is first modified by the CRISPR-C2c1 system at the distal end of the PAM sequence, and further modified by the CRISPR-C2c1 system near the PAM sequence and repaired via HDR. In certain embodiments, the locus of interest is modified by the CRISPR-C2c1 system by introducing a mutation, deletion, or insertion of exogenous DNA sequence via HDR. In some embodiments, the locus of interest is modified by the CRISPR-C2c1 system by introducing a mutation, deletion, or insertion of exogenous DNA sequence via NHEJ. In preferred embodiments, the exogenous DNA is flanked by single guide DNA (sgDNA)-PAM sequences on both 3′ and 5′ ends. In preferred embodiments, the exogenous DNA is released after CRISPR-C2c1 cleavage.

### Herpes Simplex Virus 1 and 2

[1494] Herpesviridae are a family of viruses composed of linear double-stranded DNA genomes with 75-200 genes. For the purposes of gene editing, the most commonly studied family member is Herpes Simplex Virus-1 (HSV-1), a virus which has a distinct number of advantages over other viral vectors (reviewed in Vannuci et al. (2003)). Thus, in some embodiments, the viral vector is an HSV viral vector. In some embodiments, the HSV viral vector is HSV-1.

[1495] HSV-1 has a large genome of approximately 152 kb of double stranded DNA. This genome comprises of more than 80 genes, many of which can be replaced or removed, allowing a gene insert of between 30-150 kb. The viral vectors derived from HSV-1 are generally separated into 3 groups: replication-competent attenuated vectors, replication-incompetent recombinant vectors, and defective helper-dependent vectors known as amplicons. Gene transfer using HSV-1 as a vector has been demonstrated previously, for instance for the treatment of neuropathic pain (see, e.g., Wolfe et al. (2009) Gene Ther) and rheumatoid arthritis (see e.g., Burton et al. (2001) Stem Cells).

[1496] Thus, in some embodiments, the viral vector is an HSV viral vector. In some embodiments, the HSV viral vector is HSV-1. In some embodiments, the vector is used for delivery of one or more CRISPR components. It may be particularly useful for delivery of the C2c1 and one or more guide RNAs, for example 2 or more, 3 or more, or 4 or more guide RNAs. In some embodiments, the vector is theretofore useful in a multiplex system. In some embodiments, this delivery is for the treatment of treatment of neuropathic pain or rheumatoid arthritis.

[1497] In some embodiments, the treatment, prophylaxis or diagnosis of HSV-1 (Herpes Simplex Virus 1) is provided. The target is preferably the UL19, UL30, UL48 or UL50 gene in HSV-1. This is described in WO2015153789, the disclosure of which is hereby incorporated by reference.

[1498] In other embodiments, the treatment, prophylaxis or diagnosis of HSV-2 (Herpes Simplex Virus 2) is provided. The target is preferably the UL19, UL30, UL48 or UL50 gene in HSV-2. This is described in WO2015153791, the disclosure of which is hereby incorporated by reference.

[1499] In some embodiments, the treatment, prophylaxis or diagnosis of Primary Open Angle Glaucoma (POAG) is provided. The target is preferably the MYOC gene. This is described in WO2015153780, the disclosure of which is hereby incorporated by reference. The present invention may be applied with the methods as described above. With respect to the C2c1 protein the CRISPR-C2c1 system may recognize a PAM sequence that is a T-rich sequence. In some embodiments, the PAM sequence is 5′ TTN 3′ or 5′ ATTN 3′, wherein N is any nucleotide. In some embodiments, the CRISPR-C2c1 system introduces one or more staggered double strand breaks (DSBs) with a 5′ overhang to the target gene. In particular embodiments, the 5′ overhang is 7 nt. In some embodiments, the CRISPR-C2c1 system introduces a template DNA sequence at the staggered DSB via HR or NHEJ. In some particular embodiments, the CRISPR-C2c1 system comprises a catalytically inactivated C2c1 protein associated with a functional domain that modifies the target gene. In a particular embodiment, the CRISPR-C2c1 system introduces a single mutation. In another particular embodiment, the CRISPR-C2c1 system introduces a single nucleotide modification to the transcript of the target gene.

### Adoptive Cell Therapies

[1500] The present invention also contemplates use of the CRISPR-Cas system described herein, e.g. C2c1 effector protein systems, to modify cells for adoptive therapies.

[1501] As used herein, “ACT”, “adoptive cell therapy” and “adoptive cell transfer” may be used interchangeably. In certain embodiments, Adoptive cell therapy (ACT) can refer to the transfer of cells to a patient with the goal of transferring the functionality and characteristics into the new host by engraftment of the cells (see, e.g., Mettananda et al., Editing an α-globin enhancer in primary human hematopoietic stem cells as a treatment for β-thalassemia, Nat Commun. 2017 Sep. 4; 8(1):424). As used herein, the term “engraft” or “engraftment” refers to the process of cell incorporation into a tissue of interest in vivo through contact with existing cells of the tissue. Adoptive cell therapy (ACT) can refer to the transfer of cells, most commonly immune-derived cells, back into the same patient or into a new recipient host with the goal of transferring the immunologic functionality and characteristics into the new host. If possible, use of autologous cells helps the recipient by minimizing GVHD issues. The adoptive transfer of autologous tumor infiltrating lymphocytes (TIL) (Besser et al., (2010) Clin. Cancer Res 16 (9) 2646-55; Dudley et al., (2002) Science 298 (5594): 850-4; and Dudley et al., (2005) Journal of Clinical Oncology 23 (10): 2346-57.) or genetically re-directed peripheral blood mononuclear cells (Johnson et al., (2009) Blood 114 (3): 535-46; and Morgan et al., (2006) Science 314(5796) 126-9) has been used to successfully treat patients with advanced solid tumors, including melanoma and colorectal carcinoma, as well as patients with CD19-expressing hematologic malignancies (Kalos et al., (2011) Science Translational Medicine 3 (95): 95ra73). In certain embodiments, allogenic cells immune cells are transferred (see, e.g., Ren et al., (2017) Clin Cancer Res 23 (9) 2255-2266). As described further herein, allogenic cells can be edited to reduce alloreactivity and prevent graft-versus-host disease. Thus, use of allogenic cells allows for cells to be obtained from healthy donors and prepared for use in patients as opposed to preparing autologous cells from a patient after diagnosis.

[1502] In some embodiments, the invention described herein relates to a method for adoptive immunotherapy, in which T cells are edited ex vivo by CRISPR to modulate at least one gene and subsequently administered to a patient in need thereof. In some embodiments, the CRISPR editing comprising knocking-out or knocking-down the expression of at least one target gene in the edited T cells. In some embodiments, in addition to modulating the target gene, the T cells are also edited ex vivo by CRISPR to (1) knock-in an exogenous gene encoding a chimeric antigen receptor (CAR) or a T-cell receptor (TCR), (2) knock-out or knock-down expression of an immune checkpoint receptor, (3) knock-out or knock-down expression of an endogenous TCR, (4) knock-out or knock-down expression of a human leukocyte antigen class I (HLA-I) proteins, and/or (5) knock-out or knock-down expression of an endogenous gene encoding an antigen targeted by an exogenous CAR or TCR.

[1503] In some embodiments, the T cells are contacted ex vivo with an adeno-associated virus (AAV) vector encoding a CRISPR effector protein, and a guide molecule comprising a guide sequence hybridizable to a target sequence, a tracr mate sequence, and a tracr sequence hybridizable to the tracr mate sequence. In some embodiments, the T cells are contacted ex vivo (e.g., by electroporation) with a ribonucleoprotein (RNP) comprising a CRISPR effector protein complexed with a guide molecule, wherein the guide molecule comprising a guide sequence hybridizable to a target sequence, a tracr mate sequence, and a tracr sequence hybridizable to the tracr mate sequence. See Rupp et al., Scientific Reports 7:737 (2017); Liu et al., Cell Research 27:154-157 (2017). In some embodiments, the T cells are contacted ex vivo (e.g., by electroporation) with an mRNA encoding a CRISPR effector protein, and a guide molecule comprising a guide sequence hybridizable to a target sequence, a tracr mate sequence, and a tracr sequence hybridizable to the tracr mate sequence. See Eyquem et al., Nature 543:113-117 (2017). In some embodiments, the T cells are not contacted ex vivo with a lentivirus or retrovirus vector.

[1504] In some embodiments, the method comprises editing T cells ex vivo by CRISPR to knock-in an exogenous gene encoding a CAR, thereby allowing the edited T cells to recognize cancer cells based on the expression of specific proteins located on the cell surface. In some embodiments, T cells are edited ex vivo by CRISPR to knock-in an exogenous gene encoding a TCR, thereby allowing the edited T cells to recognize proteins derived from either the surface or inside of the cancer cells. In some embodiments, the method comprising providing an exogenous CAR-encoding or TCR-encoding sequence as a donor sequence, which can be integrated by homology-directed repair (HDR) into a genomic locus targeted by a CRISPR guide sequence. In some embodiments, targeting the exogenous CAR or TCR to an endogenous TCR a constant (TRAC) locus can reduce tonic CAR signaling and facilitate effective internalization and re-expression of the CAR following single or repeated exposure to antigen, thereby delaying effector T-cell differentiation and exhaustion. See Eyquem et al., Nature 543:113-117 (2017).

[1505] In some embodiments, the method comprises editing T cells ex vivo by CRISPR to block one or more immune checkpoint receptors to reduce immunosuppression by cancer cells. In some embodiments, T cells are edited ex vivo by CRISPR to knock-out or knock-down an endogenous gene involved in the programmed death-1 (PD-1) signaling pathway, such as PD-1 and PD-L1. In some embodiments, T cells are edited ex vivo by CRISPR to mutate the Pdcd1 locus or the CD274 locus. In some embodiments, T cells are edited ex vivo by CRISPR using one or more guide sequences targeting the first exon of PD-1. See Rupp et al., Scientific Reports 7:737 (2017); Liu et al., Cell Research 27:154-157 (2017).

[1506] In some embodiments, the method comprises editing T cells ex vivo by CRISPR to eliminate potential alloreactive TCRs to allow allogeneic adoptive transfer. In some embodiments, T cells are edited ex vivo by CRISPR to knock-out or knock-down an endogenous gene encoding a TCR (e.g., an a TCR) to avoid graft-versus-host-disease (GVHD). In some embodiments, T cells are edited ex vivo by CRISPR to mutate the TRAC locus. In some embodiments, T cells are edited ex vivo by CRISPR using one or more guide sequences targeting the first exon of TRAC. See Liu et al., Cell Research 27:154-157 (2017). In some embodiments, the method comprises use of CRISPR to knock-in an exogenous gene encoding a CAR or a TCR into the TRAC locus, while simultaneously knocking-out the endogenous TCR (e.g., with a donor sequence encoding a self-cleaving P2A peptide following the CAR cDNA). See Eyquem et al., Nature 543:113-117 (2017). In some embodiments, the exogenous gene comprises a promoter-less CAR-encoding or TCR-encoding sequence which is inserted operably downstream of an endogenous TCR promoter.

[1507] In some embodiments, the method comprises editing T cells ex vivo by CRISPR to knock-out or knock-down an endogenous gene encoding an HLA-I protein to minimize immunogenicity of the edited T cells. In some embodiments, T cells are edited ex vivo by CRISPR to mutate the beta-2 microglobulin (B2M) locus. In some embodiments, T cells are edited ex vivo by CRISPR using one or more guide sequences targeting the first exon of B2M. See Liu et al., Cell Research 27:154-157 (2017). In some embodiments, the method comprises use of CRISPR to knock-in an exogenous gene encoding a CAR or a TCR into the B2M locus, while simultaneously knocking-out the endogenous B2M (e.g., with a donor sequence encoding a self-cleaving P2A peptide following the CAR cDNA). See Eyquem et al., Nature 543:113-117 (2017). In some embodiments, the exogenous gene comprises a promoter-less CAR-encoding or TCR-encoding sequence which is inserted operably downstream of an endogenous B2M promoter.

[1508] In some embodiments, the method comprises editing T cells ex vivo by CRISPR to knock-out or knock-down an endogenous gene encoding an antigen targeted by an exogenous CAR or TCR. In some embodiments, the T cells are edited ex vivo by CRISPR to knock-out or knock-down the expression of a tumor antigen selected from human telomerase reverse transcriptase (hTERT), survivin, mouse double minute 2 homolog (MDM2), cytochrome P450 1B 1 (CYP1B), HER2/neu, Wilms' tumor gene 1 (WT1), livin, alphafetoprotein (AFP), carcinoembryonic antigen (CEA), mucin 16 (MUC16), MUC1, prostate-specific membrane antigen (PSMA), p53 or cyclin (DI) (see WO2016/011210). In some embodiments, the T cells are edited ex vivo by CRISPR to knock-out or knock-down the expression of an antigen selected from B cell maturation antigen (BCMA), transmembrane activator and CAML Interactor (TACI), or B-cell activating factor receptor (BAFF-R), CD38, CD138, CS-1, CD33, CD26, CD30, CD53, CD92, CD100, CD148, CD150, CD200, CD261, CD262, or CD362 (see WO2017/011804).

[1509] Aspects of the invention accordingly involve the adoptive transfer of immune system cells, such as T cells, specific for selected antigens, such as tumor associated antigens (see Maus et al., 2014, Adoptive Immunotherapy for Cancer or Viruses, Annual Review of Immunology, Vol. 32: 189-225; Rosenberg and Restifo, 2015, Adoptive cell transfer as personalized immunotherapy for human cancer, Science Vol. 348 no. 6230 pp. 62-68; and, Restifo et al., 2015, Adoptive immunotherapy for cancer: harnessing the T cell response. Nat. Rev. Immunol. 12(4): 269-281; and Jenson and Riddell, 2014, Design and implementation of adoptive therapy with chimeric antigen receptor-modified T cells. Immunol Rev. 257(1): 127-144). Various strategies may for example be employed to genetically modify T cells by altering the specificity of the T cell receptor (TCR) for example by introducing new TCR α and β chains with selected peptide specificity (see U.S. Pat. No. 8,697,854; PCT Patent Publications: WO2003020763, WO2004033685, WO2004044004, WO2005114215, WO2006000830, WO2008038002, WO2008039818, WO2004074322, WO2005113595, WO2006125962, WO2013166321, WO2013039889, WO2014018863, WO2014083173; U.S. Pat. No. 8,088,379).

[1510] As an alternative to, or addition to, TCR modifications, chimeric antigen receptors (CARs) may be used in order to generate immunoresponsive cells, such as T cells, specific for selected targets, such as malignant cells, with a wide variety of receptor chimera constructs having been described (see U.S. Pat. Nos. 5,843,728; 5,851,828; 5,912,170; 6,004,811; 6,284,240; 6,392,013; 6,410,014; 6,753,162; 8,211,422; and, PCT Publication WO9215322). Autologous T cells engineered to express chimeric antigen receptors (CARs) against leukemia antigens such as CD19 on B cells have shown promising results for the treatment of relapsed or refractory B-cell malignancies. However, a subset of cancer patients especially heavily pretreated cancer patients could be unable to receive this highly active therapy because of failed expansion. Moreover, it is still a challenge to manufacture an effective therapeutic product for infant cancer patients due to their small blood volume. On the other hand, the inherent characters of autologous CAR-T cell therapy including personalized autologous T cell manufacturing and widely “distributed” approach result in the difficulty of industrialization of autologous CAR-T cell therapy. Universal CD19-specific CAR-T cell(UCART19),derived from one or more healthy unrelated donors but could avoid graft-versus-host-disease (GVHD) and minimize their immunogenicity, is undoubtedly an alternative option to address above-mentioned issues. Alternative CAR constructs may be characterized as belonging to successive generations. First-generation CARs typically consist of a single-chain variable fragment of an antibody specific for an antigen, for example comprising a VL linked to a VH of a specific antibody, linked by a flexible linker, for example by a CD8α hinge domain and a CD8α transmembrane domain, to the transmembrane and intracellular signaling domains of either CD3ζ or FcRγ (scFv-CD3ζ or scFv-FcRγ; see U.S. Pat. Nos. 7,741,465; 5,912,172; 5,906,936). Second-generation CARs incorporate the intracellular domains of one or more costimulatory molecules, such as CD28, OX40 (CD134), or 4-1BB (CD137) within the endodomain (for example scFv-CD28/OX40/4-1BB-CD3ζ; see U.S. Pat. Nos. 8,911,993; 8,916,381; 8,975,071; 9,101,584; 9,102,760; 9,102,761). Third-generation CARs include a combination of costimulatory endodomains, such a CD3ζ-chain, CD97, GDI 1a-CD18, CD2, ICOS, CD27, CD154, CDS, OX40, 4-1BB, or CD28 signaling domains (for example scFv-CD28-4-1BB-CD3ζ or scFv-CD28-OX40-CD3ζ; see U.S. Pat. Nos. 8,906,682; 8,399,645; 5,686,281; PCT Publication No. WO2014134165; PCT Publication No. WO2012079000). Alternatively, costimulation may be orchestrated by expressing CARs in antigen-specific T cells, chosen so as to be activated and expanded following engagement of their native αβTCR, for example by antigen on professional antigen-presenting cells, with attendant costimulation. In addition, additional engineered receptors may be provided on the immunoresponsive cells, for example to improve targeting of a T-cell attack and/or minimize side effects. Han et. al (clinicaltrials, A Study Evaluating UCART019 in Patients with Relapsed or Refactory CD19+ Lukemia and Lymphoma) have generated gene-disrupted allogeneic CD19-directed BBζ CAR-T cells (termed UCART019) by combining the lentiviral delivery of CAR and CRISPR RNA electroporation to disrupt endogenous TCR and B2M genes simultaneously and will test whether it can evade host-mediated immunity and deliver antileukemic effects without GVHD.

[1511] Alternative techniques may be used to transform target immunoresponsive cells, such as protoplast fusion, lipofection, transfection or electroporation. A wide variety of vectors may be used, such as retroviral vectors, lentiviral vectors, adenoviral vectors, adeno-associated viral vectors, plasmids or transposons, such as a Sleeping Beauty transposon (see U.S. Pat. Nos. 6,489,458; 7,148,203; 7,160,682; 7,985,739; 8,227,432), may be used to introduce CARs, for example using 2nd generation antigen-specific CARs signaling through CD3ζ and either CD28 or CD137. Viral vectors may for example include vectors based on HIV, SV40, EBV, HSV or BPV.

[1512] Cells that are targeted for transformation may for example include T cells, Natural Killer (NK) cells, cytotoxic T lymphocytes (CTL), regulatory T cells, human embryonic stem cells, tumor-infiltrating lymphocytes (TIL) or a pluripotent stem cell from which lymphoid cells may be differentiated. T cells expressing a desired CAR may for example be selected through co-culture with γ-irradiated activating and propagating cells (AaPC), which co-express the cancer antigen and co-stimulatory molecules. The engineered CAR T-cells may be expanded, for example by co-culture on AaPC in presence of soluble factors, such as IL-2 and IL-21. This expansion may for example be carried out so as to provide memory CAR+ T cells (which may for example be assayed by non-enzymatic digital array and/or multi-panel flow cytometry). In this way, CAR T cells may be provided that have specific cytotoxic activity against antigen-bearing tumors (optionally in conjunction with production of desired chemokines such as interferon-). CAR T cells of this kind may for example be used in animal models, for example to threat tumor xenografts.

[1513] In general, CARs are comprised of an extracellular domain, a transmembrane domain, and an intracellular domain, wherein the extracellular domain comprises an antigen-binding domain that is specific for a predetermined target. While the antigen-binding domain of a CAR is often an antibody or antibody fragment (e.g., a single chain variable fragment, scFv), the binding domain is not particularly limited so long as it results in specific recognition of a target. For example, in some embodiments, the antigen-binding domain may comprise a receptor, such that the CAR is capable of binding to the ligand of the receptor. Alternatively, the antigen-binding domain may comprise a ligand, such that the CAR is capable of binding the endogenous receptor of that ligand.

[1514] The antigen-binding domain of a CAR is generally separated from the transmembrane domain by a hinge or spacer. The spacer is also not particularly limited, and it is designed to provide the CAR with flexibility. For example, a spacer domain may comprise a portion of a human Fc domain, including a portion of the CH3 domain, or the hinge region of any immunoglobulin, such as IgA, IgD, IgE, IgG, or IgM, or variants thereof. Furthermore, the hinge region may be modified so as to prevent off-target binding by FcRs or other potential interfering objects. For example, the hinge may comprise an IgG4 Fc domain with or without a S228P, L235E, and/or N297Q mutation (according to Kabat numbering) in order to decrease binding to FcRs. Additional spacers/hinges include, but are not limited to, CD4, CD8, and CD28 hinge regions.

[1515] The transmembrane domain of a CAR may be derived either from a natural or from a synthetic source. Where the source is natural, the domain may be derived from any membrane bound or transmembrane protein. Transmembrane regions of particular use in this disclosure may be derived from CD8, CD28, CD3, CD45, CD4, CD5, CDS, CD9, CD 16, CD22, CD33, CD37, CD64, CD80, CD86, CD 134, CD137, CD 154, TCR. Alternatively, the transmembrane domain may be synthetic, in which case it will comprise predominantly hydrophobic residues such as leucine and valine. Preferably a triplet of phenylalanine, tryptophan and valine will be found at each end of a synthetic transmembrane domain. Optionally, a short oligo- or polypeptide linker, preferably between 2 and 10 amino acids in length may form the linkage between the transmembrane domain and the cytoplasmic signaling domain of the CAR. A glycine-serine doublet provides a particularly suitable linker.

[1516] Alternative CAR constructs may be characterized as belonging to successive generations. First-generation CARs typically consist of a single-chain variable fragment of an antibody specific for an antigen, for example comprising a VL linked to a VH of a specific antibody, linked by a flexible linker, for example by a CD8α hinge domain and a CD8α transmembrane domain, to the transmembrane and intracellular signaling domains of either CD3ζ or FcRγ (scFv-CD3ζ or scFv-FcRγ; see U.S. Pat. Nos. 7,741,465; 5,912,172; 5,906,936). Second-generation CARs incorporate the intracellular domains of one or more costimulatory molecules, such as CD28, OX40 (CD134), or 4-1BB (CD137) within the endodomain (for example scFv-CD28/OX40/4-1BB-CD3ζ; see U.S. Pat. Nos. 8,911,993; 8,916,381; 8,975,071; 9,101,584; 9,102,760; 9,102,761). Third-generation CARs include a combination of costimulatory endodomains, such a CD3ζ-chain, CD97, GDI 1a-CD18, CD2, ICOS, CD27, CD154, CDS, OX40, 4-1BB, CD2, CD7, LIGHT, LFA-1, NKG2C, B7-H3, CD30, CD40, PD-1, or CD28 signaling domains (for example scFv-CD28-4-1BB-CD3ζ or scFv-CD28-OX40-CD3ζ; see U.S. Pat. Nos. 8,906,682; 8,399,645; 5,686,281; PCT Publication No. WO2014134165; PCT Publication No. WO2012079000). In certain embodiments, the primary signaling domain comprises a functional signaling domain of a protein selected from the group consisting of CD3 zeta, CD3 gamma, CD3 delta, CD3 epsilon, common FcR gamma (FCERIG), FcR beta (Fc Epsilon Rib), CD79a, CD79b, Fc gamma RIIa, DAP10, and DAP12. In certain preferred embodiments, the primary signaling domain comprises a functional signaling domain of CD3ζ or FcRγ. In certain embodiments, the one or more costimulatory signaling domains comprise a functional signaling domain of a protein selected, each independently, from the group consisting of: CD27, CD28, 4-1BB (CD137), OX40, CD30, CD40, PD-1, ICOS, lymphocyte function-associated antigen-1 (LFA-1), CD2, CD7, LIGHT, NKG2C, B7-H3, a ligand that specifically binds with CD83, CDS, ICAM-1, GITR, BAFFR, HVEM (LIGHTR), SLAMF7, NKp80 (KLRF1), CD160, CD19, CD4, CD8 alpha, CD8 beta, IL2R beta, IL2R gamma, IL7R alpha, ITGA4, VLA1, CD49a, ITGA4, IA4, CD49D, ITGA6, VLA-6, CD49f, ITGAD, CDIId, ITGAE, CD103, ITGAL, CD11a, LFA-1, ITGAM, CD11b, ITGAX, CD11c, ITGB1, CD29, ITGB2, CD18, ITGB7, TNFR2, TRANCE/RANKL, DNAM1 (CD226), SLAMF4 (CD244, 2B4), CD84, CD96 (Tactile), CEACAM1, CRTAM, Ly9 (CD229), CD160 (BY55), PSGL1, CD100 (SEMA4D), CD69, SLAMF6 (NTB-A, Lyl08), SLAM (SLAMF1, CD150, IPO-3), BLAME (SLAMF8), SELPLG (CD162), LTBR, LAT, GADS, SLP-76, PAG/Cbp, NKp44, NKp30, NKp46, and NKG2D. In certain embodiments, the one or more costimulatory signaling domains comprise a functional signaling domain of a protein selected, each independently, from the group consisting of: 4-1BB, CD27, and CD28. In certain embodiments, a chimeric antigen receptor may have the design as described in U.S. Pat. No. 7,446,190, comprising an intracellular domain of CD3ζ chain (such as amino acid residues 52-163 of the human CD3 zeta chain, as shown in SEQ ID NO: 14 of U.S. Pat. No. 7,446,190), a signaling region from CD28 and an antigen-binding element (or portion or domain; such as scFv). The CD28 portion, when between the zeta chain portion and the antigen-binding element, may suitably include the transmembrane and signaling domains of CD28 (such as amino acid residues 114-220 of SEQ ID NO: 10, full sequence shown in SEQ ID NO: 6 of U.S. Pat. No. 7,446,190; these can include the following portion of CD28 as set forth in Genbank identifier NM_006139 (sequence version 1, 2 or 3):

(SEQ ID NO: 478)
IEVMYPPPYLDNEKSNGTIIHVKGKHLCPSPLFPGPSKPFWVLVVVGGVL
ACYSLLVTVAFIIFWVRSKRSRLLHSDYMNMTPRRPGPTRKHYQPYAPPR
DFAAYRS).

Alternatively, when the zeta sequence lies between the CD28 sequence and the antigen-binding element, intracellular domain of CD28 can be used alone (such as amino sequence set forth in SEQ ID NO: 9 of U.S. Pat. No. 7,446,190). Hence, certain embodiments employ a CAR comprising (a) a zeta chain portion comprising the intracellular domain of human CD3ζ chain, (b) a costimulatory signaling region, and (c) an antigen-binding element (or portion or domain), wherein the costimulatory signaling region comprises the amino acid sequence encoded by SEQ ID NO: 6 of U.S. Pat. No. 7,446,190.

[1517] Alternatively, costimulation may be orchestrated by expressing CARs in antigen-specific T cells, chosen so as to be activated and expanded following engagement of their native αβTCR, for example by antigen on professional antigen-presenting cells, with attendant costimulation. In addition, additional engineered receptors may be provided on the immunoresponsive cells, for example to improve targeting of a T-cell attack and/or minimize side effects

[1518] By means of an example and without limitation, Kochenderfer et al., (2009) J Immunother. 32 (7): 689-702 described anti-CD19 chimeric antigen receptors (CAR). FMC63-28Z CAR contained a single chain variable region moiety (scFv) recognizing CD19 derived from the FMC63 mouse hybridoma (described in Nicholson et al., (1997) Molecular Immunology 34: 1157-1165), a portion of the human CD28 molecule, and the intracellular component of the human TCR-ζ molecule. FMC63-CD828BBZ CAR contained the FMC63 scFv, the hinge and transmembrane regions of the CD8 molecule, the cytoplasmic portions of CD28 and 4-1BB, and the cytoplasmic component of the TCR-ζ molecule. The exact sequence of the CD28 molecule included in the FMC63-28Z CAR corresponded to Genbank identifier NM_006139; the sequence included all amino acids starting with the amino acid sequence IEVMYPPPY and continuing all the way to the carboxy-terminus of the protein. To encode the anti-CD19 scFv component of the vector, the authors designed a DNA sequence which was based on a portion of a previously published CAR (Cooper et al., (2003) Blood 101: 1637-1644). This sequence encoded the following components in frame from the 5′ end to the 3′ end: an XhoI site, the human granulocyte-macrophage colony-stimulating factor (GM-CSF) receptor α-chain signal sequence, the FMC63 light chain variable region (as in Nicholson et al., supra), a linker peptide (as in Cooper et al., supra), the FMC63 heavy chain variable region (as in Nicholson et al., supra), and a NotI site. A plasmid encoding this sequence was digested with XhoI and NotI. To form the MSGV-FMC63-28Z retroviral vector, the XhoI and NotI-digested fragment encoding the FMC63 scFv was ligated into a second XhoI and NotI-digested fragment that encoded the MSGV retroviral backbone (as in Hughes et al., (2005) Human Gene Therapy 16: 457-472) as well as part of the extracellular portion of human CD28, the entire transmembrane and cytoplasmic portion of human CD28, and the cytoplasmic portion of the human TCR-ζ molecule (as in Maher et al., 2002) Nature Biotechnology 20: 70-75). The FMC63-28Z CAR is included in the KTE-C19 (axicabtagene ciloleucel) anti-CD19 CAR-T therapy product in development by Kite Pharma, Inc. for the treatment of inter alia patients with relapsed/refractory aggressive B-cell non-Hodgkin lymphoma (NHL). Accordingly, in certain embodiments, cells intended for adoptive cell therapies, more particularly immunoresponsive cells such as T cells, may express the FMC63-28Z CAR as described by Kochenderfer et al. (supra). Hence, in certain embodiments, cells intended for adoptive cell therapies, more particularly immunoresponsive cells such as T cells, may comprise a CAR comprising an extracellular antigen-binding element (or portion or domain; such as scFv) that specifically binds to an antigen, an intracellular signaling domain comprising an intracellular domain of a CD3ζ chain, and a costimulatory signaling region comprising a signaling domain of CD28. Preferably, the CD28 amino acid sequence is as set forth in Genbank identifier NM_006139 (sequence version 1, 2 or 3) starting with the amino acid sequence IEVMYPPPY and continuing all the way to the carboxy-terminus of the protein. The sequence is reproduced herein:

(SEQ ID NO: 479)
IEVMYPPPYLDNEKSNGTIIHVKGKHLCPSPLFPGPSKPFWVLVVVGGVL
ACYSLLVTVAFIIFWVRSKRSRLLHSDYMNMTPRRPGPTRKHYQPYAPPR
DFAAYRS.

Preferably, the antigen is CD19, more preferably the antigen-binding element is an anti-CD19 scFv, even more preferably the anti-CD19 scFv as described by Kochenderfer et al. (supra).

[1519] Additional anti-CD19 CARs are further described in WO2015187528. More particularly Example 1 and Table 1 of WO2015187528, incorporated by reference herein, demonstrate the generation of anti-CD19 CARs based on a fully human anti-CD19 monoclonal antibody (47G4, as described in US20100104509) and murine anti-CD19 monoclonal antibody (as described in Nicholson et al. and explained above). Various combinations of a signal sequence (human CD8-alpha or GM-CSF receptor), extracellular and transmembrane regions (human CD8-alpha) and intracellular T-cell signalling domains (CD28-CD3ζ; 4-1BB-CD3ζ; CD27-CD3ζ; CD28-CD27-CD3ζ, 4-1BB-CD27-CD3ζ; CD27-4-1BB-CD3ζ; CD28-CD27-FcεRI gamma chain; or CD28-FcεFRI gamma chain) were disclosed. Hence, in certain embodiments, cells intended for adoptive cell therapies, more particularly immunoresponsive cells such as T cells, may comprise a CAR comprising an extracellular antigen-binding element that specifically binds to an antigen, an extracellular and transmembrane region as set forth in Table 1 of WO2015187528 and an intracellular T-cell signalling domain as set forth in Table 1 of WO2015187528. Preferably, the antigen is CD19, more preferably the antigen-binding element is an anti-CD19 scFv, even more preferably the mouse or human anti-CD19 scFv as described in Example 1 of WO2015187528. In certain embodiments, the CAR comprises, consists essentially of or consists of an amino acid sequence of SEQ ID NO: 1, SEQ ID NO: 2, SEQ ID NO: 3, SEQ ID NO: 4, SEQ ID NO: 5, SEQ ID NO: 6, SEQ ID NO: 7, SEQ ID NO: 8, SEQ ID NO: 9, SEQ ID NO: 10, SEQ ID NO: 11, SEQ ID NO: 12, or SEQ ID NO: 13 as set forth in Table 1 of WO2015187528.

[1520] By means of an example and without limitation, chimeric antigen receptor that recognizes the CD70 antigen is described in WO2012058460A2 (see also, Park et al., CD70 as a target for chimeric antigen receptor T cells in head and neck squamous cell carcinoma, Oral Oncol. 2018 March; 78:145-150; and Jin et al., CD70, a novel target of CAR T-cell therapy for gliomas, Neuro Oncol. 2018 Jan. 10; 20(1):55-65). CD70 is expressed by diffuse large B-cell and follicular lymphoma and also by the malignant cells of Hodgkins lymphoma, Waldenstrom's macroglobulinemia and multiple myeloma, and by HTLV-1- and EBV-associated malignancies. (Agathanggelou et al. Am. J. Pathol. 1995; 147: 1152-1160; Hunter et al., Blood 2004; 104:4881. 26; Lens et al., J Immunol. 2005; 174:6212-6219; Baba et al., J Virol. 2008; 82:3843-3852.) In addition, CD70 is expressed by non-hematological malignancies such as renal cell carcinoma and glioblastoma. (Junker et al., J Urol. 2005; 173:2150-2153; Chahlavi et al., Cancer Res 2005; 65:5428-5438) Physiologically, CD70 expression is transient and restricted to a subset of highly activated T, B, and dendritic cells.

[1521] By means of an example and without limitation, chimeric antigen receptor that recognizes BCMA has been described (see, e.g., US20160046724A1; WO2016014789A2; WO2017211900A1; WO2015158671A1; US20180085444A1; WO2018028647A1; US20170283504A1; and WO2013154760A1).

[1522] The CRISPR systems disclosed herein may be used for targeting an antigen to be targeted in adoptive cell therapy. In certain embodiments, an antigen (such as a tumor antigen) to be targeted in adoptive cell therapy (such as TIL, CAR, or TCR T-cell therapy) of a disease (such as particularly of tumor or cancer) may be selected from a group consisting of: B cell maturation antigen (BCMA) (see, e.g., Friedman et al., Effective Targeting of Multiple BCMA-Expressing Hematological Malignancies by Anti-BCMA CAR T Cells, Hum Gene Ther. 2018 Mar. 8; Berdeja J G, et al. Durable clinical responses in heavily pretreated patients with relapsed/refractory multiple myeloma: updated results from a multicenter study of bb2121 anti-Bema CAR T cell therapy. Blood. 2017; 130:740; and Mouhieddine and Ghobrial, Immunotherapy in Multiple Myeloma: The Era of CAR T Cell Therapy, Hematologist, May-June 2018, Volume 15, issue 3); PSA (prostate-specific antigen); prostate-specific membrane antigen (PSMA); PSCA (Prostate stem cell antigen); Tyrosine-protein kinase transmembrane receptor ROR1; fibroblast activation protein (FAP); Tumor-associated glycoprotein 72 (TAG72); Carcinoembryonic antigen (CEA); Epithelial cell adhesion molecule (EPCAM); Mesothelin; Human Epidermal growth factor Receptor 2 (ERBB2 (Her2/neu)); Prostase; Prostatic acid phosphatase (PAP); elongation factor 2 mutant (ELF2M); Insulin-like growth factor 1 receptor (IGF-1R); gp100; BCR-ABL (breakpoint cluster region-Abelson); tyrosinase; New York esophageal squamous cell carcinoma 1 (NY-ESO-1); x-light chain, LAGE (L antigen); MAGE (melanoma antigen); Melanoma-associated antigen 1 (MAGE-A1); MAGE A3; MAGE A6; legumain; Human papillomavirus (HPV) E6; HPV E7; prostein; survivin; PCTA1 (Galectin 8); Melan-A/MART-1; Ras mutant; TRP-1 (tyrosinase related protein 1, or gp75); Tyrosinase-related Protein 2 (TRP2); TRP-2/INT2 (TRP-2/intron 2); RAGE (renal antigen); receptor for advanced glycation end products 1 (RAGE1); Renal ubiquitous 1, 2 (RU1, RU2); intestinal carboxyl esterase (iCE); Heat shock protein 70-2 (HSP70-2) mutant; thyroid stimulating hormone receptor (TSHR); CD123; CD171; CD19; CD20; CD22; CD26; CD30; CD33; CD44v7/8 (cluster of differentiation 44, exons 7/8); CD53; CD92; CD100; CD148; CD150; CD200; CD261; CD262; CD362; CS-1 (CD2 subset 1, CRACC, SLAMF7, CD319, and 19A24); C-type lectin-like molecule-1 (CLL-1); ganglioside GD3 (aNeu5Ac(2-8)aNeu5Ac(2-3)bDGa1p(1-4)bDG1cp(1-1)Cer); Tn antigen (Tn Ag); Fms-Like Tyrosine Kinase 3 (FLT3); CD38; CD138; CD44v6; B7H3 (CD276); KIT (CD117); Interleukin-13 receptor subunit alpha-2 (IL-13Ra2); Interleukin 11 receptor alpha (IL-11Ra); prostate stem cell antigen (PSCA); Protease Serine 21 (PRSS21); vascular endothelial growth factor receptor 2 (VEGFR2); Lewis(Y) antigen; CD24; Platelet-derived growth factor receptor beta (PDGFR-beta); stage-specific embryonic antigen-4 (SSEA-4); Mucin 1, cell surface associated (MUC1); mucin 16 (MUC16); epidermal growth factor receptor (EGFR); epidermal growth factor receptor variant III (EGFRvIII); neural cell adhesion molecule (NCAM); carbonic anhydrase IX (CAIX); Proteasome (Prosome, Macropain) Subunit, Beta Type, 9 (LMP2); ephrin type-A receptor 2 (EphA2); Ephrin B2; Fucosyl GM1; sialyl Lewis adhesion molecule (sLe); ganglioside GM3 (aNeu5Ac(2-3)bDGa1p(1-4)bDG1cp(1-1)Cer); TGS5; high molecular weight-melanoma-associated antigen (HMWMAA); o-acetyl-GD2 ganglioside (OAcGD2); Folate receptor alpha; Folate receptor beta; tumor endothelial marker 1 (TEM1/CD248); tumor endothelial marker 7-related (TEM7R); claudin 6 (CLDN6); G protein-coupled receptor class C group 5, member D (GPRC5D); chromosome X open reading frame 61 (CXORF61); CD97; CD179a; anaplastic lymphoma kinase (ALK); Polysialic acid; placenta-specific 1 (PLAC1); hexasaccharide portion of globoH glycoceramide (GoboH); mammary gland differentiation antigen (NY-BR-1); uroplakin 2 (UPK2); Hepatitis A virus cellular receptor 1 (HAVCR1); adrenoceptor beta 3 (ADRB3); pannexin 3 (PANX3); G protein-coupled receptor 20 (GPR20); lymphocyte antigen 6 complex, locus K 9 (LY6K); Olfactory receptor 51E2 (OR51E2); TCR Gamma Alternate Reading Frame Protein (TARP); Wilms tumor protein (WT1); ETS translocation-variant gene 6, located on chromosome 12p (ETV6-AML); sperm protein 17 (SPA17); X Antigen Family, Member 1A (XAGE1); angiopoietin-binding cell surface receptor 2 (Tie 2); CT (cancer/testis (antigen)); melanoma cancer testis antigen-1 (MAD-CT-1); melanoma cancer testis antigen-2 (MAD-CT-2); Fos-related antigen 1; p53; p53 mutant; human Telomerase reverse transcriptase (hTERT); sarcoma translocation breakpoints; melanoma inhibitor of apoptosis (ML-IAP); ERG (transmembrane protease, serine 2 (TMPRSS2) ETS fusion gene); N-Acetyl glucosaminyl-transferase V (NA17); paired box protein Pax-3 (PAX3); Androgen receptor; Cyclin B1; Cyclin D1; v-myc avian myelocytomatosis viral oncogene neuroblastoma derived homolog (MYCN); Ras Homolog Family Member C (RhoC); Cytochrome P450 1B1 (CYP1B1); CCCTC-Binding Factor (Zinc Finger Protein)-Like (BORIS); Squamous Cell Carcinoma Antigen Recognized By T Cells-1 or 3 (SART1, SART3); Paired box protein Pax-5 (PAX5); proacrosin binding protein sp32 (OY-TES1); lymphocyte-specific protein tyrosine kinase (LCK); A kinase anchor protein 4 (AKAP-4); synovial sarcoma, X breakpoint-1, -2, -3 or -4 (SSX1, SSX2, SSX3, SSX4); CD79a; CD79b; CD72; Leukocyte-associated immunoglobulin-like receptor 1 (LAIR1); Fc fragment of IgA receptor (FCAR); Leukocyte immunoglobulin-like receptor subfamily A member 2 (LILRA2); CD300 molecule-like family member f (CD300LF); C-type lectin domain family 12 member A (CLECI2A); bone marrow stromal cell antigen 2 (BST2); EGF-like module-containing mucin-like hormone receptor-like 2 (EMR2); lymphocyte antigen 75 (LY75); Glypican-3 (GPC3); Fc receptor-like 5 (FCRL5); mouse double minute 2 homolog (MDM2); livin; alphafetoprotein (AFP); transmembrane activator and CAML Interactor (TACI); B-cell activating factor receptor (BAFF-R); V-Ki-ras2 Kirsten rat sarcoma viral oncogene homolog (KRAS); immunoglobulin lambda-like polypeptide 1 (IGLL1); 707-AP (707 alanine proline); ART-4 (adenocarcinoma antigen recognized by T4 cells); BAGE (B antigen; b-catenin/m, b-catenin/mutated); CAMEL (CTL-recognized antigen on melanoma); CAP1 (carcinoembryonic antigen peptide 1); CASP-8 (caspase-8); CDC27m (cell-division cycle 27 mutated); CDK4/m (cycline-dependent kinase 4 mutated); Cyp-B (cyclophilin B); DAM (differentiation antigen melanoma); EGP-2 (epithelial glycoprotein 2); EGP-40 (epithelial glycoprotein 40); Erbb2, 3, 4 (erythroblastic leukemia viral oncogene homolog-2, -3, 4); FBP (folate binding protein); fAchR (Fetal acetylcholine receptor); G250 (glycoprotein 250); GAGE (G antigen); GnT-V (N-acetylglucosaminyltransferase V); HAGE (helicose antigen); ULA-A (human leukocyte antigen-A); HST2 (human signet ring tumor 2); KIAA0205; KDR (kinase insert domain receptor); LDLR/FUT (low density lipid receptor/GDP L-fucose: b-D-galactosidase 2-a-L fucosyltransferase); L1CAM (L1 cell adhesion molecule); MC1R (melanocortin 1 receptor); Myosin/m (myosin mutated); MUM-1, -2, -3 (melanoma ubiquitous mutated 1, 2, 3); NA88-A (NA cDNA clone of patient M88); KG2D (Natural killer group 2, member D) ligands; oncofetal antigen (h5T4); p190 minor bcr-abl (protein of 190KD bcr-abl); Pml/RARa (promyelocytic leukaemia/retinoic acid receptor a); PRAME (preferentially expressed antigen of melanoma); SAGE (sarcoma antigen); TEL/AML1 (translocation Ets-family leukemia/acute myeloid leukemia 1); TPI/m (triosephosphate isomerase mutated); CD70; trophoblast glycoprotein (TPBG); αvβó integrin, B7-H3; B7-H6; CD20; CD44; chondroitin sulfate proteoglycan 4 (CSPG4), bDGalpNAc(1-4)[aNeu5Ac(2-8)aNeu5Ac(2-3)]bDGa1p(1-4)bDG1cp(1-1)Cer (GD2), aNeu5Ac(2-8)aNeu5Ac(2-3)bDGa1p(1-4)bDG1cp(1-1)Cer (GD3); human leukocyte antigen A1 MAGE family member A1 (HLA-A1⁺MAGEA1); human leukocyte antigen A2 MAGE family member A1 (HLA-A2+MAGEA1); human leukocyte antigen A3 MAGE family member A1 (HLA-A3+MAGEA1); MAGEA1; human leukocyte antigen A1 New York Esophageal Squamous Cell Carcinoma 1 (FILA-A1⁺NY-ESO-1); human leukocyte antigen A2 New York Esophageal Squamous Cell Carcinoma 1 (HLA-A2+NY-ESO-1), lambda light chain, kappa light chain, tumor endothelial marker 5 (TEM5), tumor endothelial marker 7 (TEM7), tumor endothelial marker 8 (TEM8), TEM5, TEM7, TEM8, IFN-inducible p78, melanotransferrin (p97), human kallikrein (huK2), Axl, ROR2, FKBP11, KAMP3, ITGA8, FCRL5, LAGA-1, CD133, cD34, EBV nuclear antigen-1 (EBNA1), latent membrane protein 1 (LMP1) and LMP2A, CD75, gp100, MICA, MICB, MART1, carcinoembryonic antigen, CA-125, MAGEC2, CTAG2, CTAG1, pd-12, CLA, CD142, CD73, CD49c, CD66c, CD104, CD318, TSPAN8, CLEC14, human immunodeficiency virus 1 (HIV-1) reverse transcriptase (RT), Cd16, BLTA, IL-2, IL-7, IL-15, IL-21,IL-12, CCR4, CCR2b, Heparanase, CD137L, LEM, and Bcl-2, Msln, Cd8, IL-15, 4-1BBL, OX40L, 4-IBB, cd95, cd27, HVENM, CXCR4; and any combination thereof. In some example, the antigen to be targeted may be CXCR. In some examples, the antigen to be targeted may be PD-1.

[1523] In certain embodiments, an antigen to be targeted in adoptive cell therapy (such as particularly CAR or TCR T-cell therapy) of a disease (such as particularly of tumor or cancer) is a tumor-specific antigen (TSA).

[1524] In certain embodiments, an antigen to be targeted in adoptive cell therapy (such as particularly CAR or TCR T-cell therapy) of a disease (such as particularly of tumor or cancer) is a neoantigen.

[1525] In certain embodiments, an antigen to be targeted in adoptive cell therapy (such as particularly CAR or TCR T-cell therapy) of a disease (such as particularly of tumor or cancer) is a tumor-associated antigen (TAA).

[1526] In certain embodiments, an antigen to be targeted in adoptive cell therapy (such as particularly CAR or TCR T-cell therapy) of a disease (such as particularly of tumor or cancer) is a universal tumor antigen. In certain preferred embodiments, the universal tumor antigen is selected from the group consisting of: a human telomerase reverse transcriptase (hTERT), survivin, mouse double minute 2 homolog (MDM2), cytochrome P450 1B 1 (CYP1B), HER2/neu, Wilms' tumor gene 1 (WT1), livin, alphafetoprotein (AFP), carcinoembryonic antigen (CEA), mucin 16 (MUC16), MUC1, prostate-specific membrane antigen (PSMA), p53, cyclin (D1), and any combinations thereof.

[1527] In certain embodiments, an antigen (such as a tumor antigen) to be targeted in adoptive cell therapy (such as particularly CAR or TCR T-cell therapy) of a disease (such as particularly of tumor or cancer) may be selected from a group consisting of: CD19, BCMA, CD70, CLL-1, MAGE A3, MAGE A6, HPV E6, HPV E7, WT1, CD22, CD171, ROR1, MUC16, and SSX2. In certain preferred embodiments, the antigen may be CD19. For example, CD19 may be targeted in hematologic malignancies, such as in lymphomas, more particularly in B-cell lymphomas, such as without limitation in diffuse large B-cell lymphoma, primary mediastinal b-cell lymphoma, transformed follicular lymphoma, marginal zone lymphoma, mantle cell lymphoma, acute lymphoblastic leukemia including adult and pediatric ALL, non-Hodgkin lymphoma, indolent non-Hodgkin lymphoma, or chronic lymphocytic leukemia. For example, BCMA may be targeted in multiple myeloma or plasma cell leukemia (see, e.g., 2018 American Association for Cancer Research (AACR) Annual meeting Poster: Allogeneic Chimeric Antigen Receptor T Cells Targeting B Cell Maturation Antigen). For example, CLL1 may be targeted in acute myeloid leukemia. For example, MAGE A3, MAGE A6, SSX2, and/or KRAS may be targeted in solid tumors. For example, HPV E6 and/or HPV E7 may be targeted in cervical cancer or head and neck cancer. For example, WT1 may be targeted in acute myeloid leukemia (AML), myelodysplastic syndromes (MDS), chronic myeloid leukemia (CML), non-small cell lung cancer, breast, pancreatic, ovarian or colorectal cancers, or mesothelioma. For example, CD22 may be targeted in B cell malignancies, including non-Hodgkin lymphoma, diffuse large B-cell lymphoma, or acute lymphoblastic leukemia. For example, CD171 may be targeted in neuroblastoma, glioblastoma, or lung, pancreatic, or ovarian cancers. For example, ROR1 may be targeted in ROR1+ malignancies, including non-small cell lung cancer, triple negative breast cancer, pancreatic cancer, prostate cancer, ALL, chronic lymphocytic leukemia, or mantle cell lymphoma. For example, MUC16 may be targeted in MUC16ecto+ epithelial ovarian, fallopian tube or primary peritoneal cancer. For example, CD70 may be targeted in both hematologic malignancies as well as in solid cancers such as renal cell carcinoma (RCC), gliomas (e.g., GBM), and head and neck cancers (HNSCC). CD70 is expressed in both hematologic malignancies as well as in solid cancers, while its expression in normal tissues is restricted to a subset of lymphoid cell types (see, e.g., 2018 American Association for Cancer Research (AACR) Annual meeting Poster: Allogeneic CRISPR Engineered Anti-CD70 CAR-T Cells Demonstrate Potent Preclinical Activity Against Both Solid and Hematological Cancer Cells).

[1528] In some embodiments, the target antigen is a viral antigen. Many viral antigen targets have been identified and are known, including peptides derived from viral genomes in HIV, HTLV and other viruses (see e.g., Addo et al. (2007) PLoS ONE, 2, e321; Tsomides et al. (1994) J Exp Med, 180, 1283-93; Utz et al. (1996) J Virol, 70, 843-51). Exemplary viral antigens include, but are not limited to, an antigen from hepatitis A, hepatit s B (e.g., HBV core and surface antigens (HBVc, HBVs)), hepatitis C (HCV), Epstein-Ban* virus (e.g. EBVA), human papillomavirus (HPV; e.g. E6 and E7), human immunodeficiency type-1 virus (HIV1), Kaposi's sarcoma herpes virus (KSHV), human papilloma virus (HPV), influenza virus, Lassa virus, HTLN-i, HIN-1, HIN-IL CMN, EBN or HPN. In some embodiments, the target protein is a bacterial antigen or other pathogenic antigen, such as Mycobacterium tuberculosis (MT) antigens, trypanosome, e.g., Tiypansoma cruzi (T. cruzi), antigens such as surface antigen (TSA), or malaria antigens. Specific viral antigen or epitopes or other pathogenic antigens or peptide epitopes are known (see e.g., Addo et al. (2007) PLoS ONE, 2, e321; Anikeeva et al. (2009) Clin Immunol, 130, 98-109). [0133] In some embodiments, the antigen is an antigen derived from a virus associated with cancer, such as an oncogenic virus. For example, an oncogenic virus is one in which infection from certain viruses are known to lead to the development of different types of cancers, for example, hepatitis A, hepatitis B (HB V), hepatitis C (HCV), human papilloma virus (HPV), hepatitis viral infections, Epstein-Barr virus (EBV), human herpes virus 8 (HHV-8), human T-cell leukemia virus-1 (HTLV-1), human T-cell leukemia virus-2 (HTLV-2), or a cytomegalovirus (CMV) antigen. In some embodiments, the viral antigen is an HPV antigen, which, in some cases, can lead to a greater risk of developing cervical and/or head and neck cancers. In some embodiments, the antigen can be a HPV-16 antigen, and HPV-18 antigen, and HPV-31 antigen, an HPV-33 antigen or an HPV-35 antigen. In some embodiments, the viral antigen is an HPV-16 antigens (e.g., seroreactive regions of the E1, E2, E6 or E7 proteins of HPV-16, see e.g. U.S. Pat. No. 6,531,127) or an HPV-18 antigens (e.g., seroreactive regions of the LI and/or L2 proteins of HPV-18, such as described in U.S. Pat. No. 5,840,306).

[1529] In some embodiments, the viral antigen is a HBV or HCV antigen, which, in some cases, can lead to a greater risk of developing liver cancer than HBV or HCV negative subjects. For example, in some embodiments, the heterologous antigen is an HBV antigen, such as a hepatitis B core antigen or an hepatitis B envelope antigen (US2012/0308580).

[1530] In some embodiments, the viral antigen is an EBV antigen, which, in some cases, can lead to a greater risk for developing Burkitt's lymphoma, nasopharyngeal carcinoma and Hodgkin's disease than EBV negative subjects. For example, EBV is a human herpes virus that, in some cases, is found associated with numerous human tumors of diverse tissue origin. While primarily found as an asymptomatic infection, EBV-positive tumors can be characterized by active expression of viral gene products, such as EBNA-1, LMP-1 and LMP-2A. In some embodiments, the heterologous antigen is an EBV antigen that can include Epstein-Barr nuclear antigen (EBNA)-1, EBNA-2, EBNA-3A, EBNA-3B, EBNA-3C, EBNA-leader protein (EBNA-LP), latent membrane proteins LMP-1, LMP-2A and LMP-2B, EBV-EA, EBV-MA or EBV-VCA. [0137] In some embodiments, the viral antigen is an HTLV-1 or HTLV-2 antigen, which, in some cases, can lead to a greater risk for developing T-cell leukemia than HTLV-1 or HTLV-2 negative subjects. For example, in some embodiments, the heterologous antigen is an HTLV-antigen, such as TAX.

[1531] In some embodiments, the viral antigen is a HHV-8 antigen, which, in some cases, can lead to a greater risk for developing Kaposi's sarcoma than HHV-8 negative subjects. In some embodiments, the heterologous antigen is a CMV antigen, such as pp65 or pp64 (see U.S. Pat. No. 8,361,473).

[1532] In some embodiments, the viral antigen is a virus-specific surface antigen such as an HIV-specific antigen (such as HIV gp120); an EBV-specific antigen, a CMV-specific antigen, a HPV-specific antigen, a Lasse Virus-specific antigen, an Influenza Virus-specific antigen as well as any derivate or variant of these surface markers.

[1533] In one aspect, the present invention provides a treatment for tumors of the central nerve system, particularly induced by neurofibromatosis type 1 (NF1) neurogenetic conditions. individuals with NF1 are born with a germline mutation in the NF1 gene, but may develop numerous distinct neurological problems, ranging from autism and attention deficit to brain and peripheral nerve sheath tumors. The present invention may be used to develop a patient-specific disease model and to study induced pluripotent stem cell (iPSC)-derived disease relevant cells in an isogenic background. Embryonic stem cell (ESC)-like cells, also known as induced pluripotent stem cell or iPSC, can be generated from skin or blood cells in adult patients. recent research efforts have started to develop culture protocols that differentiate iPSCs into a variety of cell types in the central and peripheral nervous system (CNS and PNS), which are affected in NF1 patients. the CRISPR C2c1 system of this invention may be used to genetically edit the specific disease genes either by repairing the existing mutant genes or creating new mutations. In order to position at the forefront of NF1 research, it will be important for the Gilbert Family Neurofibromatosis Institute (GFNI) at the Children's National Medical Center to explore these recent exciting research developments, to systematically develop patient-specific human NF1 disease models, and to provide a tool for drug screening and evaluation on the individual NF patients.

[1534] Approaches such as the foregoing may be adapted to provide methods of treating and/or increasing survival of a subject having a disease, such as a neoplasia, for example by administering an effective amount of an immunoresponsive cell comprising an antigen recognizing receptor that binds a selected antigen, wherein the binding activates the immunoreponsive cell, thereby treating or preventing the disease (such as a neoplasia, a pathogen infection, an autoimmune disorder, or an allogeneic transplant reaction). Dosing in CAR T cell therapies may for example involve administration of from 106 to 109 cells/kg, with or without a course of lymphodepletion, for example with cyclophosphamide.

[1535] A person with ordinary skills in the art may the CRISPR-C2c1 system disclosed in this invention in a similar system as described above. With respect to the C2c1 protein, the CRISPR-C2c1 system may recognize a PAM sequence that is a T-rich sequence. In some embodiments, the PAM sequence is 5′ TTN 3′ or 5′ ATTN 3′, wherein N is any nucleotide. In some embodiments, the CRISPR-C2c1 system introduces one or more staggered double strand breaks (DSBs) with a 5′ overhang to the target gene. In particular embodiments, the 5′ overhang is 7 nt. In some embodiments, the CRISPR-C2c1 system introduces a template DNA sequence at the staggered DSB via HR or NHEJ. In some particular embodiments, the CRISPR-C2c1 system comprises a catalytically inactivated C2c1 protein associated with a functional domain that modifies the target gene. In a particular embodiment, the CRISPR-C2c1 system introduces a single mutation. In another particular embodiment, the CRISPR-C2c1 system introduces a single nucleotide modification to the transcript of the target gene.

[1536] In one embodiment, the treatment can be administrated into patients undergoing an immunosuppressive treatment. The cells or population of cells, may be made resistant to at least one immunosuppressive agent due to the inactivation of a gene encoding a receptor for such immunosuppressive agent. Not being bound by a theory, the immunosuppressive treatment should help the selection and expansion of the immunoresponsive or T cells according to the invention within the patient.

[1537] The administration of the cells or population of cells according to the present invention may be carried out in any convenient manner, including by aerosol inhalation, injection, ingestion, transfusion, implantation or transplantation. The cells or population of cells may be administered to a patient subcutaneously, intradermally, intratumorally, intranodally, intramedullary, intramuscularly, by intravenous or intralymphatic injection, or intraperitoneally. In one embodiment, the cell compositions of the present invention are preferably administered by intravenous injection.

[1538] The administration of the cells or population of cells can consist of the administration of 104-109 cells per kg body weight, preferably 105 to 106 cells/kg body weight including all integer values of cell numbers within those ranges. Dosing in CAR T cell therapies may for example involve administration of from 106 to 109 cells/kg, with or without a course of lymphodepletion, for example with cyclophosphamide. The cells or population of cells can be administrated in one or more doses. In another embodiment, the effective amount of cells are administrated as a single dose. In another embodiment, the effective amount of cells are administrated as more than one dose over a period time. Timing of administration is within the judgment of managing physician and depends on the clinical condition of the patient. The cells or population of cells may be obtained from any source, such as a blood bank or a donor. While individual needs vary, determination of optimal ranges of effective amounts of a given cell type for a particular disease or conditions are within the skill of one in the art. An effective amount means an amount which provides a therapeutic or prophylactic benefit. The dosage administrated will be dependent upon the age, health and weight of the recipient, kind of concurrent treatment, if any, frequency of treatment and the nature of the effect desired.

[1539] In another embodiment, the effective amount of cells or composition comprising those cells are administrated parenterally. The administration can be an intravenous administration. The administration can be directly done by injection within a tumor.

[1540] To guard against possible adverse reactions, engineered immunoresponsive cells may be equipped with a transgenic safety switch, in the form of a transgene that renders the cells vulnerable to exposure to a specific signal. For example, the herpes simplex viral thymidine kinase (TK) gene may be used in this way, for example by introduction into allogeneic T lymphocytes used as donor lymphocyte infusions following stem cell transplantation (Greco, et al., Improving the safety of cell therapy with the TK-suicide gene. Front. Pharmacol. 2015; 6: 95). In such cells, administration of a nucleoside prodrug such as ganciclovir or acyclovir causes cell death. Alternative safety switch constructs include inducible caspase 9, for example triggered by administration of a small-molecule dimerizer that brings together two nonfunctional icasp9 molecules to form the active enzyme. A wide variety of alternative approaches to implementing cellular proliferation controls have been described (see U.S. Patent Publication No. 20130071414; PCT Patent Publication WO2011146862; PCT Patent Publication WO2014011987; PCT Patent Publication WO2013040371; Zhou et al. BLOOD, 2014, 123/25:3895-3905; Di Stasi et al., The New England Journal of Medicine 2011; 365:1673-1683; Sadelain M, The New England Journal of Medicine 2011; 365:1735-173; Ramos et al., Stem Cells 28(6):1107-15 (2010)).

[1541] In a further refinement of adoptive therapies, genome editing with a CRISPR-Cas system as described herein may be used to tailor immunoresponsive cells to alternative implementations, for example providing edited CAR T cells (see Poirot et al., 2015, Multiplex genome edited T-cell manufacturing platform for “off-the-shelf” adoptive T-cell immunotherapies, Cancer Res 75 (18): 3853). For example, immunoresponsive cells may be edited to delete expression of some or all of the class of HLA type II and/or type I molecules, or to knockout selected genes that may inhibit the desired immune response, such as the PD1 gene.

[1542] Cells may be edited using any CRISPR system and method of use thereof as described herein. CRISPR systems may be delivered to an immune cell by any method described herein. In preferred embodiments, cells are edited ex vivo and transferred to a subject in need thereof. Immunoresponsive cells, CAR T cells or any cells used for adoptive cell transfer may be edited. Editing may be performed to eliminate potential alloreactive T-cell receptors (TCR), disrupt the target of a chemotherapeutic agent, block an immune checkpoint, activate a T cell, and/or increase the differentiation and/or proliferation of functionally exhausted or dysfunctional CD8+ T-cells (see PCT Patent Publications: WO2013176915, WO2014059173, WO2014172606, WO2014184744, and WO2014191128). Editing may result in inactivation of a gene.

[1543] By inactivating a gene it is intended that the gene of interest is not expressed in a functional protein form. In a particular embodiment, the CRISPR system specifically catalyzes cleavage in one targeted gene thereby inactivating said targeted gene. The nucleic acid strand breaks caused are commonly repaired through the distinct mechanisms of homologous recombination or non-homologous end joining (NHEJ). However, NHEJ is an imperfect repair process that often results in changes to the DNA sequence at the site of the cleavage. Repair via non-homologous end joining (NHEJ) often results in small insertions or deletions (Indel) and can be used for the creation of specific gene knockouts. Cells in which a cleavage induced mutagenesis event has occurred can be identified and/or selected by well-known methods in the art.

[1544] T cell receptors (TCR) are cell surface receptors that participate in the activation of T cells in response to the presentation of antigen. The TCR is generally made from two chains, a and p, which assemble to form a heterodimer and associates with the CD3-transducing subunits to form the T cell receptor complex present on the cell surface. Each a and p chain of the TCR consists of an immunoglobulin-like N-terminal variable (V) and constant (C) region, a hydrophobic transmembrane domain, and a short cytoplasmic region. As for immunoglobulin molecules, the variable region of the a and p chains are generated by V(D)J recombination, creating a large diversity of antigen specificities within the population of T cells. However, in contrast to immunoglobulins that recognize intact antigen, T cells are activated by processed peptide fragments in association with an MHC molecule, introducing an extra dimension to antigen recognition by T cells, known as MHC restriction. Recognition of MHC disparities between the donor and recipient through the T cell receptor leads to T cell proliferation and the potential development of graft versus host disease (GVHD). The inactivation of TCRα or TCRO can result in the elimination of the TCR from the surface of T cells preventing recognition of alloantigen and thus GVHD. However, TCR disruption generally results in the elimination of the CD3 signaling component and alters the means of further T cell expansion.

[1545] Allogeneic cells are rapidly rejected by the host immune system. It has been demonstrated that, allogeneic leukocytes present in non-irradiated blood products will persist for no more than 5 to 6 days (Boni, Muranski et al. 2008 Blood 1; 112(12):4746-54). Thus, to prevent rejection of allogeneic cells, the host's immune system usually has to be suppressed to some extent. However, in the case of adoptive cell transfer the use of immunosuppressive drugs also have a detrimental effect on the introduced therapeutic T cells. Therefore, to effectively use an adoptive immunotherapy approach in these conditions, the introduced cells would need to be resistant to the immunosuppressive treatment. Thus, in a particular embodiment, the present invention further comprises a step of modifying T cells to make them resistant to an immunosuppressive agent, preferably by inactivating at least one gene encoding a target for an immunosuppressive agent. An immunosuppressive agent is an agent that suppresses immune function by one of several mechanisms of action. An immunosuppressive agent can be, but is not limited to a calcineurin inhibitor, a target of rapamycin, an interleukin-2 receptor α-chain blocker, an inhibitor of inosine monophosphate dehydrogenase, an inhibitor of dihydrofolic acid reductase, a corticosteroid or an immunosuppressive antimetabolite. The present invention allows conferring immunosuppressive resistance to T cells for immunotherapy by inactivating the target of the immunosuppressive agent in T cells. As non-limiting examples, targets for an immunosuppressive agent can be a receptor for an immunosuppressive agent such as: CD52, glucocorticoid receptor (GR), a FKBP family gene member and a cyclophilin family gene member.

[1546] Immune checkpoints are inhibitory pathways that slow down or stop immune reactions and prevent excessive tissue damage from uncontrolled activity of immune cells. In certain embodiments, the immune checkpoint targeted is the programmed death-1 (PD-1 or CD279) gene (PDCD1). In other embodiments, the immune checkpoint targeted is cytotoxic T-lymphocyte-associated antigen (CTLA-4). In additional embodiments, the immune checkpoint targeted is another member of the CD28 and CTLA4 Ig superfamily such as BTLA, LAG3, ICOS, PDL1 or KIR. In further additional embodiments, the immune checkpoint targeted is a member of the TNFR superfamily such as CD40, OX40, CD137, GITR, CD27 or TIM-3.

[1547] Additional immune checkpoints include Src homology 2 domain-containing protein tyrosine phosphatase 1 (SHP-1) (Watson H A, et al., SHP-1: the next checkpoint target for cancer immunotherapy? Biochem Soc Trans. 2016 Apr. 15; 44(2):356-62). SHP-1 is a widely expressed inhibitory protein tyrosine phosphatase (PTP). In T-cells, it is a negative regulator of antigen-dependent activation and proliferation. It is a cytosolic protein, and therefore not amenable to antibody-mediated therapies, but its role in activation and proliferation makes it an attractive target for genetic manipulation in adoptive transfer strategies, such as chimeric antigen receptor (CAR) T cells. Immune checkpoints may also include T cell immunoreceptor with Ig and ITIM domains (TIGIT/Vstm3/WUCAM/VSIG9) and VISTA (Le Mercier I, et al., (2015) Beyond CTLA-4 and PD-1, the generation Z of negative checkpoint regulators. Front. Immunol. 6:418).

[1548] WO2014172606 relates to the use of MT1 and/or MT1 inhibitors to increase proliferation and/or activity of exhausted CD8+ T-cells and to decrease CD8+ T-cell exhaustion (e.g., decrease functionally exhausted or unresponsive CD8+ immune cells). In certain embodiments, metallothioneins are targeted by gene editing in adoptively transferred T cells.

[1549] In certain embodiments, targets of gene editing may be at least one targeted locus involved in the expression of an immune checkpoint protein. Such targets may include, but are not limited to CTLA4, PPP2CA, PPP2CB, PTPN6, PTPN22, PDCD1, ICOS (CD278), PDL1, KIR, LAG3, HAVCR2, BTLA, CD160, TIGIT, CD96, CRTAM, LAIR1, SIGLEC7, SIGLEC9, CD244 (2B4), TNFRSF10B, TNFRSF10A, CASP8, CASP10, CASP3, CASP6, CASP7, FADD, FAS, TGFBRII, TGFRBRI, SMAD2, SMAD3, SMAD4, SMAD10, SKI, SKIL, TGIF1, IL10RA, IL10RB, HMOX2, IL6R, IL6ST, EIF2AK4, CSK, PAG1, SIT1, FOXP3, PRDM1, BATF, VISTA, GUCY1A2, GUCY1A3, GUCY1B2, GUCY1B3, MT1, MT2, CD40, OX40, CD137, GITR, CD27, SHP-1, TIM-3, CEACAM-1, CEACAM-3, or CEACAM-5. In preferred embodiments, the gene locus involved in the expression of PD-1 or CTLA-4 genes is targeted. In other preferred embodiments, combinations of genes are targeted, such as but not limited to PD-1 and TIGIT.

[1550] In other embodiments, at least two genes are edited. Pairs of genes may include, but are not limited to PD1 and TCRα, PD1 and TCRβ, CTLA-4 and TCRα, CTLA-4 and TCRβ, LAG3 and TCRα, LAG3 and TCRβ, Tim3 and TCRα, Tim3 and TCRβ, BTLA and TCRα, BTLA and TCRβ, BY55 and TCRα, BY55 and TCRβ, TIGIT and TCRα, TIGIT and TCRβ, B7H5 and TCRα, B7H5 and TCRβ, LAIR1 and TCRα, LAIR1 and TCRβ, SIGLEC10 and TCRα, SIGLEC10 and TCRβ, 2B4 and TCRα, 2B4 and TCRβ.

[1551] Whether prior to or after genetic modification of the T cells, the T cells can be activated and expanded generally using methods as described, for example, in U.S. Pat. Nos. 6,352,694; 6,534,055; 6,905,680; 5,858,358; 6,887,466; 6,905,681; 7,144,575; 7,232,566; 7,175,843; 5,883,223; 6,905,874; 6,797,514; 6,867,041; and 7,572,631. T cells can be expanded in vitro or in vivo.

[1552] The practice of the present invention employs, unless otherwise indicated, conventional techniques of immunology, biochemistry, chemistry, molecular biology, microbiology, cell biology, genomics and recombinant DNA, which are within the skill of the art. See MOLECULAR CLONING: A LABORATORY MANUAL, 2nd edition (1989) (Sambrook, Fritsch and Maniatis); MOLECULAR CLONING: A LABORATORY MANUAL, 4th edition (2012) (Green and Sambrook); CURRENT PROTOCOLS IN MOLECULAR BIOLOGY (1987) (F. M. Ausubel, et al. eds.); the series METHODS IN ENZYMOLOGY (Academic Press, Inc.); PCR 2: A PRACTICAL APPROACH (1995) (M. J. MacPherson, B. D. Hames and G. R. Taylor eds.); ANTIBODIES, A LABORATORY MANUAL (1988) (Harlow and Lane, eds.); ANTIBODIES A LABORATORY MANUAL, 2nd edition (2013) (E. A. Greenfield ed.); and ANIMAL CELL CULTURE (1987) (R.I. Freshney, ed.).

[1553] The practice of the present invention employs, unless otherwise indicated, conventional techniques for generation of genetically modified mice. See Marten H. Hofker and Jan van Deursen, TRANSGENIC MOUSE METHODS AND PROTOCOLS, 2nd edition (2011).

### Screens/Diagnostics/Treatments Using CRISPR Systems

### Cancer

[1554] The methods and compositions of the invention can be used to identify cell states, components, and mechanisms associated with drug-tolerance and persistence of disease cells. Terai et al. (Cancer Research, 19 Dec. 2017, doi: 10.1158/0008-5472.CAN-17-1904) reported a genome-wide CRISPR/Cas9 enhancer/suppressor screen in EGFR-dependent lung cancer PC9 cells treated with erlotinib+THZ1 (CDK7/12 inhibitor) combination therapy to identify multiple genes that enhanced erlotinib/THZ1 synergy, as well as components and pathways that suppress synergy. Wang et al. (Cell Rep. 2017 Feb. 7; 18(6):1543-1557. doi: 10.1016/j.celrep.2017.01.031; Krall et al., Elife. 2017 Feb. 1; 6. pii: e18970. doi: 10.7554/eLife.18970) reported the use of genome-wide CRISPR loss-of-function screens to identify mediator of resistance to MAPK inhibitors. Donovan et al. (PLoS One. 2017 Jan. 24; 12(1):e0170445. doi: 10.1371/journal.pone.0170445. eCollection 2017) used a CRISPR-mediated approach to mutagenesis to identify novel gain-of-function and drug resistant alleles of the MAPK signaling pathway genes. Wang et al. (Cell. 2017 Feb. 23; 168(5):890-903.e15. doi: 10.1016/j.cell.2017.01.013. Epub 2017 Feb. 2) used genome-wide CRISPR screens to identify gene networks and synthetic lethal interactions with oncogenic Ras. Chow et al. (Nat Neurosci. 2017 October; 20(10):1329-1341. doi: 10.1038/nn.4620. Epub 2017 Aug. 14) developed an adeno-associated virus-mediated, autochthonous genetic CRISPR screen in glioblastoma to identify functional suppressors in glioblastoma. Xue et al. (Nature. 2014 Oct. 16; 514(7522):380-4. doi: 10.1038/nature13589. Epub 2014 Aug. 6) employed CRISPR-mediated direct mutation of cancer genes in the mouse liver.

[1555] Chen et al. (J Clin Invest. 2017 Dec. 4. pii: 90793. doi: 10.1172/JCI90793. [Epub ahead of print]) used a CRISPR-based screen to identify MYCN-amplified neuroblastoma dependency on EZH2. Support testing of EZH2 inhibitors in patients with MYCN-amplified neuroblastoma.

[1556] Vijai et al. (Cancer Discov. 2016 November; 6(11):1267-1275. Epub 2016 Sep. 21) reported use of CRISPR to generate heterozygous mutations in the mammary epithelial cell line to assess risk for breast cancer.

[1557] Chakraborty et al. (Sci Transl Med. 2017 Jul. 12; 9(398). pii: eaal5272. doi: 10.1126/scitranslmed.aa15272) used a CRISPR-based screen to identify EZH1 as potential target to treat clear cell renal cell carcinoma

[1558] Metabolic Disease

[1559] The methods and compositions of the invention provide advantages over conventional gene therapy methods in the treatment of inherited metabolic diseases of the liver, including but not limited to familial hypercholesterolemia, hemophilia, ornithine transcarbamylase deficiency, hereditary tyrosinemia type 1, and alpha-1 antitrypsin deficiency. See, Bryson et al., Yale J. Biol. Med. 90(4):553-566, 19 Dec. 2017.

[1560] Bompada et al. (Int J Biochem Cell Biol. 2016 December; 81(Pt A):82-91. doi: 10.1016/j.biocel.2016.10.022. Epub 2016 Oct. 29) described the use of CRISPR to knockout histone acetyltransferase in pancreatic beta cells to demonstrate that histone acetylation serves as a key regulator of glucose-induced increase in TXNIP gene expression and thereby glucotoxicity-inducedapoptosis.

[1561] Ocular

[1562] The invention provides efficient treatment of inherited and acquired ocular diseases of the retina. Holmgaard et al. (Mol. Ther. Nucleic Acids 9:89-99, 15 Dec. 2017 doi: 10.1016/j.omtn.2017.08.016. Epub 2017 Sep. 21) reported indel formation at high frequencies when SpCas9 was delivered by lentiviral vectors (LVs) encoding SpCas9 targeted to Vegfa and there was a significant reduction of VEGFA in transduced cells. Duan et al. (J Biol Chem. 2016 Jul. 29; 291(31):16339-47. doi: 10.1074/jbc.M116.729467. Epub 2016 May 31) describe use of CRISPR to target MDM2 genomic locus in human primary retinal pigment epithelial cells

[1563] The methods and compositions of the instant invention are similarly applicable to treatment of ocular diseases, including age-related macular degeneration.

[1564] Huang et al. (Nat Commun. 2017 Jul. 24; 8(1):112. doi: 10.1038/s41467-017-00140-3 employed CRISPR to edit VEGFR2 to treat angiogenesis-associated diseases.

[1565] Hearing

[1566] Gao et al. (Nature. 2017 Dec. 20. doi: 10.1038/nature25164. [Epub ahead of print]) reported genome editing using CRISPR-Cas9 to target Tmc1 gene in mice and reduce progressive hearing loss and deafness.

[1567] Muscle

[1568] Provenzano et al. (Mol Ther Nucleic Acids. 9:337-348. 15 Dec. 2017; doi: 10.1016/j.omtn.2017.10.006. Epub 2017 Oct. 14) reported CRISPR/Cas9-mediated deletion of CTG expansions and permanent reversion to a normal phenotype in myogenic cells from myotonic dystrophy 1 patients. The methods and compositions of the instant invention are similarly applicable to nucleotide repeat disorders, not limited to CTG expansions. Tabebordbar et al. (2016 Jan. 22; 351(6271):407-411. doi: 10.1126/science.aad5177. Epub 2015 Dec. 31) reports the use of CRISPR to edit the Dmd exon 23 locus to correct disruptive mutations in DMD. Tabebordbar shows that programmable CRISPR complexes can be delivered locally and systemically to terminally differentiated skeletal muscle fibers and cardiomyocytes, as well as muscle satellite cells, in neonatal and adult mice, where they mediate targeted gene modification, restore dystrophin expression and partially recover functional deficiencies of dystrophic muscle. See also Nelson et al., (Science. 2016 Jan. 22; 351(6271):403-7. doi: 10.1126/science.aad5143. Epub 2015 Dec. 31).

[1569] Infectious Disease

[1570] Sidik et al. (Cell. 2016 Sep. 8; 166(6):1423-1435.e12. doi: 10.1016/j.cell.2016.08.019. Epub 2016 Sep. 2) and Patel et al. (Nature. 2017 Aug. 31; 548(7669):537-542. doi: 10.1038/nature23477. Epub 2017 Aug. 7) describe a CRISPR screen in Toxoplasma and expansion of antiparasitic interventions.

[1571] There are several reports of genome-wide CRISPR screens to identify components and processes underlying host-pathogen interactions. Examples include Blondel et al. (Cell Host Microbe. 2016 Aug. 10; 20(2):226-37. doi: 10.1016/j.chom.2016.06.010. Epub 2016 Jul. 21), Shapiro et al. (Nat Microbiol. 2018 January; 3(1):73-82. doi: 10.1038/s41564-017-0043-0. Epub 2017 Oct. 23) and Park et al. (Nat Genet. 2017 February; 49(2):193-203. doi: 10.1038/ng.3741. Epub 2016 Dec. 19).

[1572] Ma et al. (Cell Host Microbe. 2017 May 10; 21(5):580-591.e7. doi: 10.1016/j.chom.2017.04.005) employed genome-wide CRISPR loss-of-function screens to identify viral transformation-driven synthetic lethal targets for therapeutic intervention.

[1573] Cardiovascular Diseases

[1574] CRISPR systems can be used as to tool to identify genes or genetic variant associated with vascular disease. This is useful for identifying potential treatment or preventative targets. Xu et al. (Atherosclerosis, 2017 Sep. 21 pii: S0021-9150(17)31265-0. doi: 10.1016/j.atherosclerosis.2017.08.031. [Epub ahead of print]) reports the use of CRISPR to knockout the ANGPTL3 gene to confirm the role of ANGPTL3 in regulating plasma level of LDL-C. Gupta et al., (Cell. 2017 Jul. 27; 170(3):522-533.e15. doi: 10.1016/j.cell.2017.06.049) reports the use of CRISPR to edit stem cell-derived endothelial cells to identify genetic variant associated with vascular diseases. Beaudoin et al., (Arterioscler Thromb Vasc Biol. 2015 June; 35(6):1472-1479. doi: 10.1161/ATVBAHA.115.305534. Epub 2015 Apr. 2), reports the use of CRISPR genome editing to disrupt binding of the transcription factors MEF2 at the locus. This sets the stage for exploring how PHACTR1 functions in the vascular endothelium influence coronary artery disease. Pashos et al. (Cell Stem Cell. 2017 Apr. 6; 20(4):558-570.e10. doi: 10.1016/j.stem.2017.03.017.) reports on using CRISPR technology to target pluripotent stem cells and hepatocyte-like cells to identify functional variants and lipid-functional genes.

[1575] In addition to being used as a tool for identifying targets, CRISPR systems can directly be used to treat or prevent cardiovascular diseases for known targets. Khera et al. (Nat Rev Genet. 2017 June; 18(6):331-344. doi: 10.1038/nrg.2016.160. Epub 2017 Mar. 13) described common variant association studies linking approximately 60 genetic loci to coronary risk used to facilitate a better understanding of causal risk factors, underlying biology development of new therapeutics. Khera explains, for example that inactivating mutations in PCSK9 decreased levels of circulating LDL cholesterol and reduced risk of CAD leading to intense interest in development of PCSK9 inhibitors. Further, antisense oligonucleotides designed to mimic protective mutations in APOC3 or LPA demonstrated a 70% reduction in triglyceride levels and 80% reduction in circulating lipoprotein(a) levels, respectively. In addition, Wang et al., (Arterioscler Thromb Vasc Biol. 2016 May; 36(5):783-6. doi: 10.1161/ATVBAHA.116.307227. Epub 2016 Mar. 3) and Ding et al. (Circ Res. 2014 Aug. 15; 115(5):488-92. doi: 10.1161/CIRCRESAHA.115.304351. Epub 2014 Jun. 10.) report the use of CRISPR to target the gene Pcsk9 for the prevention of cardiovascular disease.

[1576] The invention provides methods and compositions for investigating and treating neurological diseases and disorders. Nakayama et al., (Am J Hum Genet. 2015 May 7; 96(5):709-19. doi: 10.1016/j.ajhg.2015.03.003. Epub 2015 Apr. 9) report use of CRISPR to study the role of PYCR2 in human CNS development and to identify potential target for microcephaly and hypomyelination. Swiech et al. (Nat Biotechnol. 2015 January; 33(1):102-6. doi: 10.1038/nbt.3055. Epub 2014 Oct. 19) report use of CRISPR to target single (Mecp2) as well as multiple genes (Dnmt1, Dnmt3a and Dnmt3b) in the adult mouse brain in vivo. Shin et al. (Hum Mol Genet. 2016 Oct. 15; 25(20):4566-4576. doi: 10.1093/hmg/ddw286) describes the use of CRISPR to inactivate Huntingon's disease mutation. Platt et al. (Cell Rep. 2017 Apr. 11; 19(2):335-350. doi: 10.1016/j.celrep.2017.03.052) report use of CRISPR knockin mice to identify Chd8's role in autism spectrum disorder. Seo et al. (J Neurosci. 2017 Oct. 11; 37(41):9917-9924. doi: 10.1523/JNEUROSCI.0621-17.2017. Epub 2017 Sep. 14) describe use of CRISPR to generate models of neurodegenerative disorders. Petersen et al. (Neuron. 2017 Dec. 6; 96(5):1003-1012.e7. doi: 10.1016/j.neuron.2017.10.008. Epub 2017 Nov. 2) demonstrate CRISPR knockout of activin A receptor type I in oligodendrocyte progenitor cells to identify potential targets for diseases with remyelination failure. The methods and compositions of the instant invention are similarly applicable.

[1577] Other applications of CRISPR technology.
[1578] Renneville et al (Blood. 2015 Oct. 15; 126(16):1930-9. doi: 10.1182/blood-2015-06-649087. Epub 2015 Aug. 28) report use of CRISPR to study the roles of EHMT1 and EMHT2 in fetal hemoglobin expression and to identify novel therapeutic target for SCD.
[1579] Tothova et al. (Cell Stem Cell. 2017 Oct. 5; 21(4):547-555.e8. doi: 10.1016/j.stem.2017.07.015) reported the use of CRISPR in hematopoietic stem and progenitor cells for generating models of human myeloid diseases.
[1580] Giani et al. (Cell Stem Cell. 2016 Jan. 7; 18(1):73-78. doi: 10.1016/j.stem.2015.09.015. Epub 2015 Oct. 22) report that inactivation of SH2B3 by CRISPR/Cas9 genome editing in human pluripotent stem cells allowed enhanced erythroid cell expansion with preserved differentiation.
[1581] Wakabayashi et al. (Proc Natl Acad Sci USA. 2016 Apr. 19; 113(16):4434-9. doi: 10.1073/pnas.1521754113. Epub 2016 Apr. 4) employed CRISPR to gain insight into GATA1 transcriptional activity and to investigate the pathogenicity of noncoding variants in human erythroid disorders.
[1582] Mandal et al. (Cell Stem Cell. 2014 Nov. 6; 15(5):643-52. doi: 10.1016/j.stem.2014.10.004. Epub 2014 Nov. 6) describe CRISPR/Cas9 targeting of two clinically relevant genes, B2M and CCR5, in primary human CD4+ T cells and CD34+ hematopoietic stem and progenitor cells (HSPCs)
[1583] Polfus et al. (Am J Hum Genet. 2016 Sep. 1; 99(3):785. doi: 10.1016/j.ajhg.2016.08.002. Epub 2016 Sep. 1) used CRISPR to edit hematopoietic cell lines and follow-up targeted knockdown experiments in primary human hematopoietic stem and progenitor cells and investigate the role of GFI1B variants in human hematopoiesis.
[1584] Najm et al. (Nat Biotechnol. 2017 Dec. 18. doi: 10.1038/nbt.4048. [Epub ahead of print]) reports the use of CRISPR complex having a pair SaCas9 and SpCas9 to achieve dual targeting to generate high-complexity pooled dual-knockout libraries to identify synthetic lethal and buffering gene pairs across multiple cell types, including MAPK pathway genes and apoptotic genes.
[1585] Manguso et al. (Nature. 2017 Jul. 27; 547(7664):413-418. doi: 10.1038/nature23270. Epub 2017 Jul. 19.) reports the use of CRISPR screens to identify and/or confirm new immunotherapy targets. See also Roland et al. (Proc Natl Acad Sci USA. 2017 Jun. 20; 114(25):6581-6586. doi: 10.1073/pnas.1701263114. Epub 2017 Jun. 12.); Erb et al. (Nature. 2017 Mar. 9; 543(7644):270-274. doi: 10.1038/nature21688. Epub 2017 Mar. 1.); Hong et al., (Nat Commun. 2016 Jun. 22; 7:11987. doi: 10.1038/ncomms11987); Fei et al., (Proc Natl Acad Sci USA. 2017 Jun. 27; 114(26):E5207-E5215. doi: 10.1073/pnas.1617467114. Epub 2017 Jun. 13.); Zhang et al., (Cancer Discov. 2017 Sep. 29. doi: 10.1158/2159-8290.CD-17-0532. [Epub ahead of print]).
[1586] Joung et al. (Nature. 2017 Aug. 17; 548(7667):343-346. doi: 10.1038/nature23451. Epub 2017 Aug. 9.) reports the use of genome-wide screens to analyze long non-coding RNAs (lncRNA); see also Zhu et al., (Nat Biotechnol. 2016 December; 34(12):1279-1286. doi: 10.1038/nbt.3715. Epub 2016 Oct. 31); Sanjana et al., (Science. 2016 Sep. 30; 353(6307):1545-1549).
[1587] Barrow et al. (Mol Cell. 2016 Oct. 6; 64(1):163-175. doi: 10.1016/j.molce.2016.08.023. Epub 2016 Sep. 22.) reports the use of genome-wide CRISPR screens to search for therapeutic targets for mitochondrial diseases. See also Vafai et al., (PLoS One. 2016 Sep. 13; 11(9):e0162686. doi: 10.1371/journal.pone.0162686. eCollection 2016).
[1588] Guo et al. (Elife. 2017 Dec. 5; 6. pii: e29329. doi: 10.7554/eLife.29329) reports the use of CRISPR to target human chondrocytes to elucidate biological mechanisms for human growth.
[1589] Ramanan et al. (Sci Rep. 2015 Jun. 2; 5:10833. doi: 10.1038/srep10833) reports the use of CRISPR to target and cleave conserved regions in the HBV genome.

[1590] Gene Drives

[1591] The present invention also contemplates use of the CRISPR-Cas system described herein, e.g. C2c1 effector protein systems, to provide RNA-guided gene drives, for example in systems analogous to gene drives described in PCT Patent Publication WO 2015/105928. Systems of this kind may for example provide methods for altering eukaryotic germline cells, by introducing into the germline cell a nucleic acid sequence encoding an RNA-guided DNA nuclease and one or more guide RNAs. The guide RNAs may be designed to be complementary to one or more target locations on genomic DNA of the germline cell. The nucleic acid sequence encoding the RNA guided DNA nuclease and the nucleic acid sequence encoding the guide RNAs may be provided on constructs between flanking sequences, with promoters arranged such that the germline cell may express the RNA guided DNA nuclease and the guide RNAs, together with any desired cargo-encoding sequences that are also situated between the flanking sequences. The flanking sequences will typically include a sequence which is identical to a corresponding sequence on a selected target chromosome, so that the flanking sequences work with the components encoded by the construct to facilitate insertion of the foreign nucleic acid construct sequences into genomic DNA at a target cut site by mechanisms such as homologous recombination, to render the germline cell homozygous for the foreign nucleic acid sequence. In this way, gene-drive systems are capable of introgressing desired cargo genes throughout a breeding population (Gantz et al., 2015, Highly efficient Cas9-mediated gene drive for population modification of the malaria vector mosquito Anopheles stephensi, PNAS 2015, published ahead of print Nov. 23, 2015, doi:10.1073/pnas.1521077112; Esvelt et al., 2014, Concerning RNA-guided gene drives for the alteration of wild populations eLife 2014; 3:e03401). In some embodiments, the invention provides a method for controlling insect borne diseases, including malaria, Zika virus, west nile virus, Japanese encephalitis virus, and Dengue virus, by a gene-drive system introgressing desired cargo genes throughout a breeding population of insects. In some embodiments, the gene-drive system is a CRISPR-C2c1 system. In particular embodiments, the insect is mosquito. In select embodiments, target sequences may be selected which have few potential off-target sites in a genome. Targeting multiple sites within a target locus, using multiple guide RNAs, may increase the cutting frequency and hinder the evolution of drive resistant alleles. Truncated guide RNAs may reduce off-target cutting. Paired nickases may be used instead of a single nuclease, to further increase specificity. Gene drive constructs may include cargo sequences encoding transcriptional regulators, for example to activate homologous recombination genes and/or repress non-homologous end-joining. Target sites may be chosen within an essential gene, so that non-homologous end-joining events may cause lethality rather than creating a drive-resistant allele. The gene drive constructs can be engineered to function in a range of hosts at a range of temperatures (Cho et al. 2013, Rapid and Tunable Control of Protein Stability in Caenorhabditis elegans Using a Small Molecule, PLoS ONE 8(8): e72393. doi:10.1371/journal.pone.0072393). The CRISPR-C2c1 system as disclosed herein may be applied to similar gene drive construct and systems as described in Ganz et al. and Cho et all. in certain embodiments, the CRISPR-C2c1 system modifies a gene involved in reproduction regulation. In some embodiments, the CRISPR-C2c1 system modifies a disease related gene. In certain embodiments, the CRISPR-C2c1 system modifies a livestock biomass related gene. In certain embodiments, the CRISPR-C2c1 system modifies a livestock trait related gene. In some embodiments, the trait related gene is involved in pest and fungal infection susceptibility. In particular embodiments, the CRISPR-C2c1 system is delivered to insect cells. In a particular embodiment, the insect cell is a honey bee cell. In some embodiments, the CRISPR-C2c1 system is delivered to an animal cell. In some embodiments, the CRISPR-C2c1 system is delivered to a non-human mammal cell. In particular embodiments, the trait related gene is involved in the regulation of adiposity. With respect to the C2c1 protein, the CRISPR-C2c1 system recognizes a PAM sequence that is T-rich. In some embodiments, the PAM is 5′ TTN 3′ or 5′ ATTN 3′, wherein N is any nucleotide. In some embodiments, the CRISPR-C2c1 system introduces one or more staggered double strand breaks (DSBs) with a 5′ overhang. In particular embodiments, the 5′ overhang is 7 nt. In some embodiments, the CRISPR-C2c1 system introduces an exogenous template DNA sequence at the staggered DSB via HR or NHEJ. In some embodiments, the C2c1 effector protein comprises one or more mutations. In some embodiments, the C2c1 effector protein is a nickase. In some particular embodiments, the CRISPR-C2c1 system comprises a catalytically inactivated C2c1 protein associated with a functional domain that modifies the target locus of interest. In a particular embodiment, the CRISPR-C2c1 system introduces a single mutation. In another particular embodiment, the CRISPR-C2c1 system introduces a single nucleotide modification to the transcript of the target locus of interest without modifying the genome of the livestock.

[1592] Xenotransplantation

[1593] The present invention also contemplates use of the CRISPR-Cas system described herein, e.g. C2c1 effector protein systems, to provide RNA-guided DNA nucleases adapted to be used to provide modified tissues for transplantation. For example, RNA-guided DNA nucleases may be used to knockout, knockdown or disrupt selected genes in an animal, such as a transgenic pig (such as the human heme oxygenase-1 transgenic pig line), for example by disrupting expression of genes that encode epitopes recognized by the human immune system, i.e. xenoantigen genes. Candidate porcine genes for disruption may for example include α(1,3)-galactosyltransferase and cytidine monophosphate-N-acetylneuraminic acid hydroxylase genes (see PCT Patent Publication WO 2014/066505). In addition, genes encoding endogenous retroviruses may be disrupted, for example the genes encoding all porcine endogenous retroviruses (see Yang et al., 2015, Genome-wide inactivation of porcine endogenous retroviruses (PERVs), Science 27 Nov. 2015: Vol. 350 no. 6264 pp. 1101-1104). In addition, RNA-guided DNA nucleases may be used to target a site for integration of additional genes in xenotransplant donor animals, such as a human CD55 gene to improve protection against hyperacute rejection.

[1594] General Gene Therapy Considerations

[1595] Examples of disease-associated genes and polynucleotides amd disease specific information is available from McKusick-Nathans Institute of Genetic Medicine, Johns Hopkins University (Baltimore, Md.) and National Center for Biotechnology Information, National Library of Medicine (Bethesda, Md.), available on the World Wide Web.

[1596] Mutations in these genes and pathways can result in production of improper proteins or proteins in improper amounts which affect function. Further examples of genes, diseases and proteins are hereby incorporated by reference from U.S. Provisional application 61/736,527 filed Dec. 12, 2012. Such genes, proteins and pathways may be the target polynucleotide of a CRISPR complex of the present invention. Examples of disease-associated genes and polynucleotides are listed in Tables 7 and 8. Examples of signaling biochemical pathway-associated genes and polynucleotides are listed in Table 9.

TABLE 7

| DISEASES/ | |
|---|---|
| DISORDERS | GENE(S) |
| Neoplasia | PTEN; ATM; ATR; EGFR; ERBB2; ERBB3; ERBB4; Notch1; Notch2; |
| | Notch3; Notch4; AKT; AKT2; AKT3; HIF; HIF1a; HIF3a; Met; HRG; |
| | Bcl2; PPAR alpha; PPAR gamma; WT1 (Wilms Tumor); FGF Receptor |
| | Family members (5 members: 1, 2, 3, 4, 5); CDKN2a; APC; RB |
| | (retinoblastoma); MEN1; VHL; BRCA1; BRCA2; AR (Androgen |
| | Receptor); TSG101; IGF; IGF Receptor; Igf1 (4 variants); Igf2 |
| | (3 variants); Igf 1 Receptor; Igf 2 Receptor; Bax; Bcl2; caspases family |
| | (9 members: 1, 2, 3, 4, 6, 7, 8, 9, 12); Kras; Apc |
| Age-related Macular | Abcr; Ccl2; Cc2; cp (ceruloplasmin); Timp3; cathepsinD; Vldlr; Ccr2 |
| Degeneration | |
| Schizophrenia | Neuregulin1 (Nrg1); Erb4 (receptor for Neuregulin); Complexin1 |
| Disorders | (Cplx1); Tph1 Tryptophan hydroxylase; Tph2 Tryptophan hydroxylase |
| | 2; Neurexin 1; GSK3; GSK3a; GSK3b 5-HTT (Slc6a4); COMT; DRD |
| | (Drd1a); SLC6A3; DAOA; DTNBP1; Dao (Dao1) |
| Trinucleotide Repeat | HTT (Huntington's Dx); SBMA/SMAX1/AR (Kennedy's Dx); |
| Disorders | FXN/X25 (Friedrich's Ataxia); ATX3 (Machado-Joseph's Dx); |
| | ATXN1 and ATXN2 (spinocerebellar ataxias); DMPK (myotonic |
| | dystrophy); Atrophin-1 and Atn1 (DRPLA Dx); CBP (Creb-BP-global |
| | instability); VLDLR (Alzheimer's); Atxn7; Atxn10 |
| Fragile X Syndrome | FMR2; FXR1; FXR2; mGLUR5 |
| Secretase Related | APH-1 (alpha and beta); Presenilin (Psen1); nicastrin (Ncstn); PEN-2 |
| Disorders | |
| Others | Nos1; Parp1; Nat1; Nat2 |
| Prion-related disorders | Prp |
| ALS | SOD1; ALS2; STEX; FUS; TARDBP; VEGF (VEGF-a; VEGF-b; |
| | VEGF-c) |
| Drug addiction | Prkce (alcohol); Drd2; Drd4; ABAT (alcohol); GRIA2; Grm5; Grin1; |
| | Htr1b; Grin2a; Drd3; Pdyn; Gria1 (alcohol) |
| Autism | Mecp2; BZRAP1; MDGA2; Sema5A; Neurexin 1; Fragile X (FMR2 |
| | (AFF2); FXR1; FXR2; Mglur5) |
| Alzheimer's Disease | E1; CHIP; UCH; UBB; Tau; LRP; PICALM; Clusterin; PS1; SORL1; |
| | CR1; Vldlr; Uba1; Uba3; CHIP28 (Aqp1, Aquaporin 1); |
| | Uchl1; Uchl3; APP |
| Inflammation | IL-10; IL-1 (IL-1a; IL-1b); IL-13; IL-17 (IL-17a (CTLA8); IL-17b; IL-17c; |
| | IL-17d; IL-17f); II-23; Cx3cr1; ptpn22; TNFa; NOD2/CARD15 for IBD; |
| | IL-6; IL-12 (IL-12a; IL-12b); CTLA4; Cx3cl1 |
| Parkinson's Disease | x-Synuclein; DJ-1; LRRK2; Parkin; PINK1 |

TABLE 8

| | |
|---|---|
| Blood and | Anemia (CDAN1, CDA1, RPS19, DBA, PKLR, PK1, NT5C3, UMPH1, |
| coagulation diseases | PSN1, RHAG, RH50A, NRAMP2, SPTB, ALAS2, ANH1, ASB, |
| and disorders | ABCB7, ABC7, ASAT); Bare lymphocyte syndrome (TAPBP, TPSN, |
| | TAP2, ABCB3, PSF2, RING11, MHC2TA, C2TA, RFX5, RFXAP, |
| | RFX5), Bleeding disorders (TBXA2R, P2RX1, P2X1); Factor H and |
| | factor H-like 1 (HF1, CFH, HUS); Factor V and factor VIII (MCFD2); |
| | Factor VII deficiency (F7); Factor X deficiency (F10); Factor XI |
| | deficiency (F11); Factor XII deficiency (F12, HAF); Factor XIIIA |
| | deficiency (F13A1, F13A); Factor XIIIB deficiency (F13B); Fanconi |
| | anemia (FANCA, FACA, FA1, FA, FAA, FAAP95, FAAP90, FLJ34064, |
| | FANCB, FANCC, FACC, BRCA2, FANCD1, FANCD2, FANCD, |
| | FACD, FAD, FANCE, FACE, FANCF, XRCC9, FANCG, BRIP1, |
| | BACH1, FANCJ, PHF9, FANCL, FANCM, KIAA1596); |
| | Hemophagocytic lymphohistiocytosis disorders (PRF1, HPLH2, |
| | UNC13D, MUNC13-4, HPLH3, HLH3, FHL3); Hemophilia A (F8, F8C, |
| | HEMA); Hemophilia B (F9, HEMB), Hemorrhagic disorders (PI, ATT, |
| | F5); Leukocyde deficiencies and disorders (ITGB2, CD18, LCAMB, |
| | LAD, EIF2B1, EIF2BA, EIF2B2, EIF2B3, EIF2B5, LVWM, CACH, |
| | CLE, EIF2B4); Sickle cell anemia (HBB); Thalassemia (HBA2, HBB, |
| | HBD, LCRB, HBA1). |
| Cell dysregulation | B-cell non-Hodgkin lymphoma (BCL7A, BCL7); Leukemia (TAL1, |
| and oncology | TCL5, SCL, TAL2, FLT3, NBS1, NBS, ZNFN1A1, IK1, LYF1, |
| diseases and disorders | HOXD4, HOX4B, BCR, CIVIL, PHL, ALL, ARNT, KRAS2, RASK2, |
| | GMPS, AF10, ARHGEF12, LARG, KIAA0382, CALM, CLTH, |
| | CEBPA, CEBP, CHIC2, BTL, FLT3, KIT, PBT, LPP, NPM1, NUP214, |
| | D9546E, CAN, CAIN, RUNX1, CBFA2, AML1, WHSC1L1, NSD3, |
| | FLT3, AF1Q, NPM1, NUMA1, ZNF145, PLZF, PML, MYL, STAT5B, |
| | AF10, CALM, CLTH, ARL11, ARLTS1, P2RX7, P2X7, BCR, CML, |
| | PHL, ALL, GRAF, NF1, VRNF, WSS, NFNS, PTPN11, PTP2C, SHP2, |
| | NS1, BCL2, CCND1, PRAD1, BCL1, TCRA, GATA1, GF1, ERYF1, |
| | NFE1, ABL1, NQO1, DIA4, NMOR1, NUP214, D9546E, CAN, CAIN). |
| Inflammation and | AIDS (KIR3DL1, NKAT3, NKB1, AMB11, KIR3DS1, IFNG, CXCL12, |
| immune related | SDF1); Autoimmune lymphoproliferative syndrome (TNFRSF6, APT1, |
| diseases and disorders | FAS, CD95, ALPS1A); Combined immunodeficiency, (IL2RG, |
| | SCIDX1, SCIDX, IMD4); HIV-1 (CCL5, SCYA5, D17S136E, TCP228), |
| | HIV susceptibility or infection (IL10, CSIF, CMKBR2, CCR2, |
| | CMKBR5, CCCKR5 (CCR5)); Immunodeficiencies (CD3E, CD3G, |
| | AICDA, AID, HIGM2, TNFRSF5, CD40, UNG, DGU, HIGM4, |
| | TNFSF5, CD40LG, HIGM1, IGM, FOXP3, IPEX, AIID, XPID, PIDX, |
| | TNFRSF14B, TACI); Inflammation (IL-10, IL-1 (IL-1a, IL-1b), IL-13, |
| | IL-17 (IL-17a (CTLA8), IL-17b, IL-17c, IL-17d, IL-17f), II-23, Cx3cr1, |
| | ptpn22, TNFa, NOD2/CARD15 for IBD, IL-6, IL-12 (IL-12a, IL-12b), |
| | CTLA4, Cx3cl1); Severe combined immunodeficiencies (SCIDs) (JAK3, |
| | JAKL, DCLRE1C, ARTEMIS, SCIDA, RAG1, RAG2, ADA, PTPRC, |
| | CD45, LCA, IL7R, CD3D, T3D, IL2RG, SCIDX1, SCIDX, IMD4). |
| Metabolic, liver, | Amyloid neuropathy (TTR, PALB); Amyloidosis (APOA1, APP, AAA, |
| kidney and protein | CVAP, AD1, GSN, FGA, LYZ, TTR, PALB); Cirrhosis (KRT18, KRT8, |
| diseases and disorders | CIRH1A, NAIC, TEX292, KIAA1988); Cystic fibrosis (CFTR, ABCC7, |
| | CF, MRP7); Glycogen storage diseases (SLC2A2, GLUT2, G6PC, |
| | G6PT, G6PT1, GAA, LAMP2, LAMPB, AGL, GDE, GBE1, GYS2, |
| | PYGL, PFKM); Hepatic adenoma, 142330 (TCF1, HNF1A, MODY3), |
| | Hepatic failure, early onset, and neurologic disorder (SCOD1, SC01), |
| | Hepatic lipase deficiency (LIPC), Hepatoblastoma, cancer and |
| | carcinomas (CTNNB1, PDGFRL, PDGRL, PRLTS, AXIN1, AXIN, |
| | CTNNB1, TP53, P53, LFS1, IGF2R, MPRI, MET, CASP8, MCH5; |
| | Medullary cystic kidney disease (UMOD, HNFJ, FJHN, MCKD2, |
| | ADMCKD2); Phenylketonuria (PAH, PKU1, QDPR, DHPR, PTS); |
| | Polycystic kidney and hepatic disease (FCYT, PKHD1, ARPKD, PKD1, |
| | PKD2, PKD4, PKDTS, PRKCSH, G19P1, PCLD, SEC63). |
| Muscular/Skeletal | Becker muscular dystrophy (DMD, BMD, MYF6), Duchenne Muscular |
| diseases and disorders | Dystrophy (DMD, BMD); Emery-Dreifuss muscular dystrophy (LMNA, |
| | LMN1, EMD2, FPLD, CMD1A, HGPS, LGMD1B, LMNA, LMN1, |
| | EMD2, FPLD, CMD1A); Facioscapulohumeral muscular dystrophy |
| | (FSHMD1A, FSHD1A); Muscular dystrophy (FKRP, MDC1C, |
| | LGMD2I, LAMA2, LAMM, LARGE, KIAA0609, MDC1D, FCMD, |
| | TTID, MYOT, CAPN3, CANP3, DYSF, LGMD2B, SGCG, LGMD2C, |
| | DMDA1, SCG3, SGCA, ADL, DAG2, LGMD2D, DMDA2, SGCB, |
| | LGMD2E, SGCD, SGD, LGMD2F, CMD1L, TCAP, LGMD2G, |
| | CMD1N, TRIM32, HT2A, LGMD2H, FKRP, MDC1C, LGMD2I, TTN, |
| | CMD1G, TMD, LGMD2J, POMT1, CAV3, LGMD1C, SEPN1, SELN, |
| | RSMD1, PLEC1, PLTN, EB S1); Osteopetrosis (LRP5, BMND1, LRP7, |
| | LR3, OPPG, VBCH2, CLCN7, CLC7, OPTA2, OSTM1, GL, TCIRG1, |
| | TIRC7, OC116, OPTB1); Muscular atrophy (VAPB, VAPC, ALS8, |
| | SMN1, SMA1, SMA2, SMA3, SMA4, BSCL2, SPG17, GARS, SMAD1, |
| | CMT2D, HEXB, IGHMBP2, SMUBP2, CATF1, SMARD1). |
| Neurological and | ALS (SOD1, ALS2, STEX, FUS, TARDBP, VEGF (VEGF-a, VEGF-b, |
| neuronal diseases and | VEGF-c); Alzheimer disease (APP, AAA, CVAP, AD1, APOE, AD2, |
| disorders | PSEN2, AD4, STM2, APBB2, FE65L1, NOS3, PLAU, URK, ACE, |
| | DCP1, ACE1, MPO, PACIP1, PAXIP1L, PTIP, A2M, BLMH, BMH, |
| | PSEN1, AD3); Autism (Mecp2, BZRAP1, MDGA2, Sema5A, Neurexin |
| | 1, GLO1, MECP2, RTT, PPMX, MRX16, MRX79, NLGN3, NLGN4, |
| | KIAA1260, AUTSX2); Fragile X Syndrome (FMR2, FXR1, FXR2, |
| | mGLUR5); Huntington's disease and disease like disorders (HD, IT15, |
| | PRNP, PRIP, JPH3, JP3, HDL2, TBP, SCA17); Parkinson disease |
| | (NR4A2, NURR1, NOT, TINUR, SNCAIP, TBP, SCA17, SNCA, |
| | NACP, PARK1, PARK4, DJ1, PARK7, LRRK2, PARK8, PINK1, |
| | PARK6, UCHL1, PARKS, SNCA, NACP, PARK1, PARK4, PRKN, |
| | PARK2, PDJ, DBH, NDUFV2); Rett syndrome (MECP2, RTT, PPMX, |
| | MRX16, MRX79, CDKL5, STK9, MECP2, RTT, PPMX, MRX16, |
| | MRX79, x-Synuclein, DJ-1); Schizophrenia (Neuregulin1 (Nrg1), Erb4 |
| | (receptor for Neuregulin), Complexin1 (Cplx1), Tph1 Tryptophan |
| | hydroxylase, Tph2, Tryptophan hydroxylase 2, Neurexin 1, GSK3, |
| | GSK3a, GSK3b, 5-HTT (Slc6a4), COMT, DRD (Drd1a), SLC6A3, |
| | DAOA, DTNBP1, Dao (Dao1)); Secretase Related Disorders (APH-1 |
| | (alpha and beta), Presenilin (Psen1), nicastrin, (Ncstn), PEN-2, Nos1, |
| | Parp1, Nat1, Nat2); Trinucleotide Repeat Disorders (HTT (Huntington's |
| | Dx), SBMA/SMAX1/AR (Kennedy's Dx), FWX25 (Friedrich's |
| | Ataxia), ATX3 (Machado-Joseph's Dx), ATXN1 and ATXN2 |
| | (spinocerebellar ataxias), DMPK (myotonic dystrophy), Atrophin-1 and |
| | Atn1 (DRPLA Dx), CBP (Creb-BP-global instability), VLDLR |
| | (Alzheimer's), Atxn7, Atxn10). |
| Occular diseases and | Age-related macular degeneration (Abcr, Ccl2, Cc2, cp (ceruloplasmin), |
| disorders | Timp3, cathepsinD, Vldlr, Ccr2); Cataract (CRYAA, CRYA1, CRYBB2, |
| | CRYB2, PITX3, BFSP2, CP49, CP47, CRYAA, CRYA1, PAX6, AN2, |
| | MGDA, CRYBA1, CRYB1, CRYGC, CRYG3, CCL, LIM2, MP19, |
| | CRYGD, CRYG4, BFSP2, CP49, CP47, HSF4, CTM, HSF4, CTM, |
| | MIP, AQP0, CRYAB, CRYA2, CTPP2, CRYBB1, CRYGD, CRYG4, |
| | CRYBB2, CRYB2, CRYGC, CRYG3, CCL, CRYAA, CRYA1, GJA8, |
| | CX50, CAE1, GJA3, CX46, CZP3, CAE3, CCM1, CAM, KRIT1); |
| | Corneal clouding and dystrophy (APOA1, TGFBI, CSD2, CDGG1, |
| | CSD, BIGH3, CDG2, TACSTD2, TROP2, M1S1, VSX1, RINX, PPCD, |
| | PPD, KTCN, COL8A2, FECD, PPCD2, PIP5K3, CFD); Cornea plana |
| | congenital (KERA, CNA2); Glaucoma (MYOC, TIGR, GLC1A, JOAG, |
| | GPOA, OPTN, GLC1E, FIP2, HYPL, NRP, CYP1B1, GLC3A, OPA1, |
| | NTG, NPG, CYP1B1, GLC3A); Leber congenital amaurosis (CRB1, |
| | RP12, CRX, CORD2, CRD, RPGRIP1, LCA6, CORD9, RPE65, RP20, |
| | AIPL1, LCA4, GUCY2D, GUC2D, LCA1, CORD6, RDH12, LCA3); |
| | Macular dystrophy (ELOVL4, ADMD, STGD2, STGD3, RDS, RP7, |
| | PRPH2, PRPH, AVMD, AOFMD, VMD2). |

TABLE 9

| CELLULAR | |
|---|---|
| FUNCTION | GENES |
| PI3K/AKT | PRKCE; ITGAM; ITGA5; IRAK1; PRKAA2; EIF2AK2; PTEN; EIF4E; |
| Signaling | PRKCZ; GRK6; MAPK1; TSC1; PLK1; AKT2; IKBKB; PIK3CA; CDK8; |
| | CDKN1B; NFKB2; BCL2; PIK3CB; PPP2R1A; MAPK8; BCL2L1; |
| | MAPK3; TSC2; ITGA1; KRAS; EIF4EBP1; RELA; PRKCD; NOS3; |
| | PRKAA1; MAPK9; CDK2; PPP2CA; PIM1; ITGB7; YWHAZ; ILK; TP53; |
| | RAF1; IKBKG; RELB; DYRK1A; CDKN1A; ITGB1; MAP2K2; JAK1; |
| | AKT1; JAK2; PIK3R1; CHUK; PDPK1; PPP2R5C; CTNNB1; MAP2K1; |
| | NFKB1; PAK3; ITGB3; CCND1; GSK3A; FRAP1; SFN; ITGA2; TTK; |
| | CSNK1A1; BRAF; GSK3B; AKT3; FOXO1; SGK; HSP90AA1; RPS6KB1 |
| ERK/MAPK | PRKCE; ITGAM; ITGA5; HSPB1; IRAK1; PRKAA2; EIF2AK2; RAC1; |
| Signaling | RAP1A; TLN1; EIF4E; ELK1; GRK6; MAPK1; RAC2; PLK1; AKT2; |
| | PIK3CA; CDK8; CREB1; PRKCI; PTK2; FOS; RPS6KA4; PIK3CB; |
| | PPP2R1A; PIK3C3; MAPK8; MAPK3; ITGA1; ETS1; KRAS; MYCN; |
| | EIF4EBP1; PPARG; PRKCD; PRKAA1; MAPK9; SRC; CDK2; PPP2CA; |
| | PIM1; PIK3C2A; ITGB7; YWHAZ; PPP1CC; KSR1; PXN; RAF1; FYN; |
| | DYRK1A; ITGB1; MAP2K2; PAK4; PIK3R1; STAT3; PPP2R5C; |
| | MAP2K1; PAK3; ITGB3; ESR1; ITGA2; MYC; TTK; CSNK1A1; CRKL; |
| | BRAF; ATF4; PRKCA; SRF; STAT1; SGK |
| Glucocorticoid | RAC1; TAF4B; EP300; SMAD2; TRAF6; PCAF; ELK1; MAPK1; |
| Receptor | SMAD3; AKT2; IKBKB; NCOR2; UBE2I; PIK3CA; CREB1; FOS; |
| Signaling | HSPA5; NFKB2; BCL2; MAP3K14; STAT5B; PIK3CB; PIK3C3; MAPK8; |
| | BCL2L1; MAPK3; TSC22D3; MAPK10; NRIP1; KRAS; MAPK13; RELA; |
| | STAT5A; MAPK9; NOS2A; PBX1; NR3C1; PIK3C2A; CDKN1C; |
| | TRAF2; SERPINE1; NCOA3; MAPK14; TNF; RAF1; IKBKG; MAP3K7; |
| | CREBBP; CDKN1A; MAP2K2; JAK1; IL8; NCOA2; AKT1; JAK2; |
| | PIK3R1; CHUK; STAT3; MAP2K1; NFKB1; TGFBR1; ESR1; SMAD4; |
| | CEBPB; JUN; AR; AKT3; CCL2; MIMP1; STAT1; IL6; HSP90AA1 |
| Axonal Guidance | PRKCE; ITGAM; ROCK1; ITGA5; CXCR4; ADAM12; IGF1; RAC1; |
| Signaling | RAP1A; EIF4E; PRKCZ; NRP1; NTRK2; ARHGEF7; SMO; ROCK2; |
| | MAPK1; PGF; RAC2; PTPN11; GNAS; AKT2; PIK3CA; ERBB2; PRKCI; |
| | PTK2; CFL1; GNAQ; PIK3CB; CXCL12; PIK3C3; WNT11; PRKD1; |
| | GNB2L1; ABL1; MAPK3; ITGA1; KRAS; RHOA; PRKCD; PIK3C2A; |
| | ITGB7; GLI2; PXN; VASP; RAF1; FYN; ITGB1; MAP2K2; PAK4; |
| | ADAM17; AKT1; PIK3R1; GLI1; WNT5A; ADAM10; MAP2K1; PAK3; |
| | ITGB3; CDC42; VEGFA; ITGA2; EPHA8; CRKL; RND1; GSK3B; AKT3; |
| | PRKCA |
| Ephrin Receptor | PRKCE; ITGAM; ROCK1; ITGA5; CXCR4; IRAK1; PRKAA2; EIF2AK2; |
| Signaling | RAC1; RAP1A; GRK6; ROCK2; MAPK1; PGF; RAC2; PTPN11; GNAS; |
| | PLK1; AKT2; DOK1; CDK8; CREB1; PTK2; CFL1; GNAQ; MAP3K14; |
| | CXCL12; MAPK8; GNB2L1; ABL1; MAPK3; ITGA1; KRAS; RHOA; |
| | PRKCD; PRKAA1; MAPK9; SRC; CDK2; PIM1; ITGB7; PXN; RAF1; |
| | FYN; DYRK1A; ITGB1; MAP2K2; PAK4; AKT1; JAK2; STAT3; |
| | ADAM10; MAP2K1; PAK3; ITGB3; CDC42; VEGFA; ITGA2; EPHA8; |
| | TTK; CSNK1A1; CRKL; BRAF; PTPN13; ATF4; AKT3; SGK |
| Actin | ACTN4; PRKCE; ITGAM; ROCK1; ITGA5; IRAK1; PRKAA2; EIF2AK2; |
| Cytoskeleton | RAC1; INS; ARHGEF7; GRK6; ROCK2; MAPK1; RAC2; PLK1; AKT2; |
| Signaling | PIK3CA; CDK8; PTK2; CFL1; PIK3CB; MYH9; DIAPH1; PIK3C3; |
| | MAPK8; F2R; MAPK3; SLC9A1; ITGA1; KRAS; RHOA; PRKCD; |
| | PRKAA1; MAPK9; CDK2; PIM1; PIK3C2A; ITGB7; PPP1CC; PXN; |
| | VIL2; RAF1; GSN; DYRK1A; ITGB1; MAP2K2; PAK4; PIP5K1A; |
| | PIK3R1; MAP2K1; PAK3; ITGB3; CDC42; APC; ITGA2; TTK; |
| | CSNK1A1; CRKL; BRAF; VAV3; SGK |
| Huntington's | PRKCE; IGF11; EP300; RCOR1; PRKCZ; HDAC4; TGM2; MAPK1; |
| Disease Signaling | CAPNS1; AKT2; EGFR; NCOR2; SP1; CAPN2; PIK3CA; HDAC5; |
| | CREB1; PRKCI; HSPA5; REST; GNAQ; PIK3CB; PIK3C3; MAPK8; |
| | IGF1R; PRKD1; GNB2L1; BCL2L1; CAPN1; MAPK3; CASP8; HDAC2; |
| | HDAC7A; PRKCD; HDAC11; MAPK9; HDAC9; PIK3C2A; HDAC3; |
| | TP53; CASP9; CREBBP; AKT1; PIK3R1; PDPK1; CASP1; APAF1; |
| | FRAP1; CASP2; JUN; BAX; ATF4; AKT3; PRKCA; CLTC; SGK; |
| | HDAC6; CASP3 |
| Apoptosis | PRKCE; ROCK1; BID; IRAK1; PRKAA2; EIF2AK2; BAK1; BIRC4; |
| Signaling | GRK6; MAPK1; CAPNS1; PLK1; AKT2; IKBKB; CAPN2; CDK8; FAS; |
| | NFKB2; BCL2; MAP3K14; MAPK8; BCL2L1; CAPN1; MAPK3; CASP8; |
| | KRAS; RELA; PRKCD; PRKAA1; MAPK9; CDK2; PIM1; TP53; TNF; |
| | RAF1; IKBKG; RELB; CASP9; DYRK1A; MAP2K2; CHUK; APAF1; |
| | MAP2K1; NFKB1; PAK3; LMNA; CASP2; BIRC2; TTK; CSNK1A1; |
| | BRAF; BAX; PRKCA; SGK; CASP3; BIRC3; PARP1 |
| B Cell Receptor | RAC1; PTEN; LYN; ELK1; MAPK1; RAC2; PTPN11; AKT2; IKBKB; |
| Signaling | PIK3CA; CREB1; SYK; NFKB2; CAMK2A; MAP3K14; PIK3CB; |
| | PIK3C3; MAPK8; BCL2L1; ABL1; MAPK3; ETS1; KRAS; MAPK13; |
| | RELA; PTPN6; MAPK9; EGR1; PIK3C2A; BTK; MAPK14; RAF1; |
| | IKBKG; RELB; MAP3K7; MAP2K2; AKT1; PIK3R1; CHUK; MAP2K1; |
| | NFKB1; CDC42; GSK3A; FRAP1; BCL6; BCL10; JUN; GSK3B; ATF4; |
| | AKT3; VAV3; RPS6KB1 |
| Leukocyte | ACTN4; CD44; PRKCE; ITGAM; ROCK1; CXCR4; CYBA; RAC1; |
| Extravasation | RAP1A; PRKCZ; ROCK2; RAC2; PTPN11; MIMP14; PIK3CA; PRKCI; |
| Signaling | PTK2; PIK3CB; CXCL12; PIK3C3; MAPK8; PRKD1; ABL1; MAPK10; |
| | CYBB; MAPK13; RHOA; PRKCD; MAPK9; SRC; PIK3C2A; BTK; |
| | MAPK14; NOX1; PXN; VIL2; VASP; ITGB1; MAP2K2; CTNND1; |
| | PIK3R1; CTNNB1; CLDN1; CDC42; F11R; ITK; CRKL; VAV3; CTTN; |
| | PRKCA; MIMP1; MIMP9 |
| Integrin Signaling | ACTN4; ITGAM; ROCK1; ITGA5; RAC1; PTEN; RAP1A; TLN1; |
| | ARHGEF7; MAPK1; RAC2; CAPNS1; AKT2; CAPN2; PIK3CA; PTK2; |
| | PIK3CB; PIK3C3; MAPK8; CAV1; CAPN1; ABL1; MAPK3; ITGA1; |
| | KRAS; RHOA; SRC; PIK3C2A; ITGB7; PPP1CC; ILK; PXN; VASP; |
| | RAF1; FYN; ITGB1; MAP2K2; PAK4; AKT1; PIK3R1; TNK2; MAP2K1; |
| | PAK3; ITGB3; CDC42; RND3; ITGA2; CRKL; BRAF; GSK3B; AKT3 |
| Acute Phase | IRAK1; SOD2; MYD88; TRAF6; ELK1; MAPK1; PTPN11; AKT2; |
| Response | IKBKB; PIK3CA; FOS; NFKB2; MAP3K14; PIK3CB; MAPK8; RIPK1; |
| Signaling | MAPK3; IL6ST; KRAS; MAPK13; IL6R; RELA; SOCS1; MAPK9; FTL; |
| | NR3C1; TRAF2; SERPINE1; MAPK14; TNF; RAF1; PDK1; IKBKG; |
| | RELB; MAP3K7; MAP2K2; AKT1; JAK2; PIK3R1; CHUK; STAT3; |
| | MAP2K1; NFKB1; FRAP1; CEBPB; JUN; AKT3; IL1R1; IL6 |
| PTEN Signaling | ITGAM; ITGA5; RAC1; PTEN; PRKCZ; BCL2L11; MAPK1; RAC2; |
| | AKT2; EGFR; IKBKB; CBL; PIK3CA; CDKN1B; PTK2; NFKB2; BCL2; |
| | PIK3CB; BCL2L1; MAPK3; ITGA1; KRAS; ITGB7; ILK; PDGFRB; |
| | INSR; RAF1; IKBKG; CASP9; CDKN1A; ITGB1; MAP2K2; AKT1; |
| | PIK3R1; CHUK; PDGFRA; PDPK1; MAP2K1; NFKB1; ITGB3; CDC42; |
| | CCND1; GSK3A; ITGA2; GSK3B; AKT3; FOXO1; CASP3; RPS6KB1 |
| p53 Signaling | PTEN; EP300; BBC3; PCAF; FASN; BRCA1; GADD45A; BIRC5; AKT2; |
| | PIK3CA; CHEK1; TP53INP1; BCL2; PIK3CB; PIK3C3; MAPK8; THBS1; |
| | ATR; BCL2L1; E2F1; PMAIP1; CHEK2; TNFRSF10B ; TP73; RB1; |
| | HDAC9; CDK2; PIK3C2A; MAPK14; TP53; LRDD; CDKN1A; HIPK2; |
| | AKT1; PIK3R1; RRM2B; APAF1; CTNNB1; SIRT1; CCND1; PRKDC; |
| | ATM; SFN; CDKN2A; JUN; SNAI2; GSK3B; BAX; AKT3 |
| Aryl Hydrocarbon | HSPB1; EP300; FASN; TGM2; RXRA; MAPK1; NQO1; NCOR2; SP1; |
| Receptor | ARNT; CDKN1B; FOS; CHEK1; SMARCA4; NFKB2; MAPK8; |
| Signaling | ALDH1A1; ATR; E2F 1; MAPK3; NRIP1; CHEK2; RELA; TP73; GSTP1; |
| | RB1; SRC; CDK2; AHR; NFE2L2; NCOA3; TP53; TNF; CDKN1A; |
| | NCOA2; APAF1; NFKB1; CCND1; ATM; ESR1; CDKN2A; MYC; JUN; |
| | ESR2; BAX; IL6; CYP1B1; HSP90AA1 |
| Xenobiotic | PRKCE; EP300; PRKCZ; RXRA; MAPK1; NQ01; NCOR2; PIK3CA; |
| Metabolism | ARNT; PRKCI; NFKB2; CAMK2A; PIK3CB; PPP2R1A; PIK3C3; |
| Signaling | MAPK8; PRKD1; ALDH1A1; MAPK3; NRIP1; KRAS; MAPK13; |
| | PRKCD; GSTP1; MAPK9; NOS2A; ABCB1; AHR; PPP2CA; FTL; |
| | NFE2L2; PIK3C2A; PPARGC1A; MAPK14; TNF; RAF1; CREBBP; |
| | MAP2K2; PIK3R1; PPP2R5C; MAP2K1; NFKB1; KEAP1; PRKCA; |
| | EIF2AK3; IL6; CYP1B1; HSP90AA1 |
| SAPK/JNK | PRKCE; IRAK1; PRKAA2; EIF2AK2; RAC1; ELK1; GRK6; MAPK1; |
| Signaling | GADD45A; RAC2; PLK1; AKT2; PIK3CA; FADD; CDK8; PIK3CB; |
| | PIK3C3; MAPK8; RIPK1; GNB2L1; IRS1; MAPK3; MAPK10; DAXX; |
| | KRAS; PRKCD; PRKAA1; MAPK9; CDK2; PIM1; PIK3C2A; TRAF2; |
| | TP53; LCK; MAP3K7; DYRK1A; MAP2K2; PIK3R1; MAP2K1; PAK3; |
| | CDC42; JUN; TTK; CSNK1A1; CRKL; BRAF; SGK |
| PPAr/RXR | PRKAA2; EP300; INS; SMAD2; TRAF6; PPARA; FASN; RXRA; |
| Signaling | MAPK1; SMAD3; GNAS; IKBKB; NCOR2; ABCA1; GNAQ; NFKB2; |
| | MAP3K14; STAT5B; MAPK8; IRS1; MAPK3; KRAS; RELA; PRKAA1; |
| | PPARGC1A; NCOA3; MAPK14; INSR; RAF1; IKBKG; RELB; MAP3K7; |
| | CREBBP; MAP2K2; JAK2; CHUK; MAP2K1; NFKB1; TGFBR1; |
| | SMAD4; JUN; IL1R1; PRKCA; IL6; HSP90AA1; ADIPOQ |
| NF-KB Signaling | IRAK1; EIF2AK2; EP300; INS; MYD88; PRKCZ; TRAF6; TBK1; AKT2; |
| | EGFR; IKBKB; PIK3CA; BTRC; NFKB2; MAP3K14; PIK3CB; PIK3C3; |
| | MAPK8; RIPK1; HDAC2; KRAS; RELA; PIK3C2A; TRAF2; TLR4; |
| | PDGFRB; TNF; INSR; LCK; IKBKG; RELB; MAP3K7; CREBBP; AKT1; |
| | PIK3R1; CHUK; PDGFRA; NFKB1; TLR2; BCL10; GSK3B; AKT3; |
| | TNFAIP3; IL1R1 |
| Neuregulin | ERBB4; PRKCE; ITGAM; ITGA5; PTEN; PRKCZ; ELK1; MAPK1; |
| Signaling | PTPN11; AKT2; EGFR; ERBB2; PRKCI; CDKN1B; STAT5B; PRKD1; |
| | MAPK3; ITGA1; KRAS; PRKCD; STAT5A; SRC; ITGB7; RAF1; ITGB1; |
| | MAP2K2; ADAM17; AKT1; PIK3R1; PDPK1; MAP2K1; ITGB3; EREG; |
| | FRAP1; PSEN1; ITGA2; MYC; NRG1; CRKL; AKT3; PRKCA; |
| | HSP90AA1; RPS6KB1 |
| Wnt & Beta | CD44; EP300; LRP6; DVL3; CSNK1E; GJA1; SMO; AKT2; PIN1; CDH1; |
| catenin Signaling | BTRC; GNAQ; MARK2; PPP2R1A; WNT11; SRC; DKK1; PPP2CA; |
| | SOX6; SFRP2; ILK; LEF1; SOX9; TP53; MAP3K7; CREBBP; TCF7L2; |
| | AKT1; PPP2R5C; WNT5A; LRP5; CTNNB1; TGFBR1; CCND1; GSK3A; |
| | DVL1; APC; CDKN2A; MYC; CSNK1A1; GSK3B; AKT3; SOX2 |
| Insulin Receptor | PTEN; INS; EIF4E; PTPN1; PRKCZ; MAPK1; TSC1; PTPN11; AKT2; |
| Signaling | CBL; PIK3CA; PRKCI; PIK3CB; PIK3C3; MAPK8; IRS1; MAPK3; TSC2; |
| | KRAS; EIF4EBP1; SLC2A4; PIK3C2A; PPP1CC; INSR; RAF1; FYN; |
| | MAP2K2; JAK1; AKT1; JAK2; PIK3R1; PDPK1; MAP2K1; GSK3A; |
| | FRAP1; CRKL; GSK3B; AKT3; FOXO1; SGK; RPS6KB1 |
| IL-6 Signaling | HSPB1; TRAF6; MAPKAPK2; ELK1; MAPK1; PTPN11; IKBKB; FOS; |
| | NFKB2; MAP3K14; MAPK8; MAPK3; MAPK10; IL6ST; KRAS; |
| | MAPK13; IL6R; RELA; SOCS2; MAPK9; ABCB1; TRAF2; MAPK14; |
| | TNF; RAF1; IKBKG; RELB; MAP3K7; MAP2K2; IL8; JAK2; CHUK; |
| | STAT3; MAP2K1; NFKB1; CEBPB; JUN; IL1R1; SRF; IL6 |
| Hepatic | PRKCE; IRAK1; INS; MYD88; PRKCZ; TRAF6; PPARA; RXRA; |
| Cholestasis | IKBKB; PRKCI; NFKB2; MAP3K14; MAPK8; PRKD1; MAPK10; RELA; |
| | PRKCD; MAPK9; ABCB1; TRAF2; TLR4; TNF; INSR; IKBKG; RELB; |
| | MAP3K7; IL8; CHUK; NR1H2; TJP2; NFKB1; ESR1; SREBF1; FGFR4; |
| | JUN; IL1R1; PRKCA; IL6 |
| IGF-1 Signaling | IGF1; PRKCZ; ELK1; MAPK1; PTPN11; NEDD4; AKT2; PIK3CA; |
| | PRKCI; PTK2; FOS; PIK3CB; PIK3C3; MAPK8; IGF1R; IRS1; MAPK3; |
| | IGFBP7; KRAS; PIK3C2A; YWHAZ; PXN; RAF1; CASP9; MAP2K2; |
| | AKT1; PIK3R1; PDPK1; MAP2K1; IGFBP2; SFN; JUN; CYR61; AKT3; |
| | FOXO1; SRF; CTGF; RPS6KB1 |
| NRF2-mediated | PRKCE; EP300; SOD2; PRKCZ; MAPK1; SQSTM1; NQO1; PIK3CA; |
| Oxidative Stress | PRKCI; FOS; PIK3CB; PIK3C3; MAPK8; PRKD1; MAPK3; KRAS; |
| Response | PRKCD; GSTP1; MAPK9; FTL; NFE2L2; PIK3C2A; MAPK14; RAF1; |
| | MAP3K7; CREBBP; MAP2K2; AKT1; PIK3R1; MAP2K1; PPIB; JUN; |
| | KEAP1; GSK3B; ATF4; PRKCA; EIF2AK3; HSP90AA1 |
| Hepatic | EDN1; IGF1; KDR; FLT1; SMAD2; FGFR1; MET; PGF; SMAD3; EGFR; |
| Fibrosis/Hepatic | FAS; CSF1; NFKB2; BCL2; MYH9; IGF1R; IL6R; RELA; TLR4; |
| Stellate Cell | PDGFRB; TNF; RELB; IL8; PDGFRA; NFKB1; TGFBR1; SMAD4; |
| Activation | VEGFA; BAX; IL1R1; CCL2; HGF; MIMP1; STAT1; IL6; CTGF; MIMP9 |
| PPAR Signaling | EP300; INS; TRAF6; PPARA; RXRA; MAPK1; IKBKB; NCOR2; FOS; |
| | NFKB2; MAP3K14; STAT5B; MAPK3; NRIP1; KRAS; PPARG; RELA; |
| | STAT5A; TRAF2; PPARGC1A; PDGFRB; TNF; INSR; RAF1; IKBKG; |
| | RELB; MAP3K7; CREBBP; MAP2K2; CHUK; PDGFRA; MAP2K1; |
| | NFKB1; JUN; IL1R1; HSP90AA1 |
| Fc Epsilon RI | PRKCE; RAC1; PRKCZ; LYN; MAPK1; RAC2; PTPN11; AKT2; |
| Signaling | PIK3CA; SYK; PRKCI; PIK3CB; PIK3C3; MAPK8; PRKD1; MAPK3; |
| | MAPK10; KRAS; MAPK13; PRKCD; MAPK9; PIK3C2A; BTK; |
| | MAPK14; TNF; RAF1; FYN; MAP2K2; AKT1; PIK3R1; PDPK1; |
| | MAP2K1; AKT3; VAV3; PRKCA |
| G-Protein Coupled | PRKCE; RAP1A; RGS16; MAPK1; GNAS; AKT2; IKBKB; PIK3CA; |
| Receptor | CREB1; GNAQ; NFKB2; CAMK2A; PIK3CB; PIK3C3; MAPK3; KRAS; |
| Signaling | RELA; SRC; PIK3C2A; RAF1; IKBKG; RELB; FYN; MAP2K2; AKT1; |
| | PIK3R1; CHUK; PDPK1; STAT3; MAP2K1; NFKB1; BRAF; ATF4; |
| | AKT3; PRKCA |
| Inositol Phosphate | PRKCE; IRAK1; PRKAA2; EIF2AK2; PTEN; GRK6; MAPK1; PLK1; |
| Metabolism | AKT2; PIK3CA; CDK8; PIK3CB; PIK3C3; MAPK8; MAPK3; PRKCD; |
| | PRKAA1; MAPK9; CDK2; PIM1; PIK3C2A; DYRK1A; MAP2K2; |
| | PIP5K1A; PIK3R1; MAP2K1; PAK3; ATM; TTK; CSNK1A1; BRAF; |
| | SGK |
| PDGF Signaling | EIF2AK2; ELK1; ABL2; MAPK1; PIK3CA; FOS; PIK3CB; PIK3C3; |
| | MAPK8; CAV1; ABL1; MAPK3; KRAS; SRC; PIK3C2A; PDGFRB; |
| | RAF1; MAP2K2; JAK1; JAK2; PIK3R1; PDGFRA; STAT3; SPHK1; |
| | MAP2K1; MYC; JUN; CRKL; PRKCA; SRF; STAT1; SPHK2 |
| VEGF Signaling | ACTN4; ROCK1; KDR; FLT1; ROCK2; MAPK1; PGF; |
| | AKT2; PIK3CA; ARNT; PTK2; BCL2; PIK3CB; PIK3C3; BCL2L1; |
| | MAPK3; KRAS; HIF1A; NOS3; PIK3C2A; PXN; RAF1; MAP2K2; |
| | ELAVL1; AKT1; PIK3R1; MAP2K1; SFN; VEGFA; AKT3; FOXO1; |
| | PRKCA |
| Natural Killer Cell | PRKCE; RAC1; PRKCZ; MAPK1; RAC2; PTPN11; KIR2DL3; AKT2; |
| Signaling | PIK3CA; SYK; PRKCI; PIK3CB; PIK3C3; PRKD1; MAPK3; KRAS; |
| | PRKCD; PTPN6; PIK3C2A; LCK; RAF1; FYN; MAP2K2; PAK4; AKT1; |
| | PIK3R1; MAP2K1; PAK3; AKT3; VAV3; PRKCA |
| Cell Cycle: G1/S | HDAC4; SMAD3; SUV39H1; HDAC5; CDKN1B; BTRC; ATR; ABL1; |
| Checkpoint | E2F1; HDAC2; HDAC7A; RB1; HDAC11; HDAC9; CDK2; E2F2; |
| Regulation | HDAC3; TP53; CDKN1A; CCND1; E2F4; ATM; RBL2; SMAD4; |
| | CDKN2A; MYC; NRG1; GSK3B; RBL1; HDAC6 |
| T Cell Receptor | RAC1; ELK1; MAPK1; IKBKB; CBL; PIK3CA; FOS; NFKB2; PIK3CB; |
| Signaling | PIK3C3; MAPK8; MAPK3; KRAS; RELA; PIK3C2A; BTK; LCK; RAF1; |
| | IKBKG; RELB; FYN; MAP2K2; PIK3R1; CHUK; MAP2K1; NFKB1; |
| | ITK; BCL10; JUN; VAV3 |
| Death Receptor | CRADD; HSPB1; BID; BIRC4; TBK1; IKBKB; FADD; FAS; NFKB2; |
| Signaling | BCL2; MAP3K14; MAPK8; RIPK1; CASP8; DAXX; TNFRSF10B; RELA; |
| | TRAF2; TNF; IKBKG; RELB; CASP9; CHUK; APAF1; NFKB1; CASP2; |
| | BIRC2; CASP3; BIRC3 |
| FGF Signaling | RAC1; FGFR1; MET; MAPKAPK2; MAPK1; PTPN11; AKT2; PIK3CA; |
| | CREB1; PIK3CB; PIK3C3; MAPK8; MAPK3; MAPK13; PTPN6; |
| | PIK3C2A; MAPK14; RAF1; AKT1; PIK3R1; STAT3; MAP2K1; FGFR4; |
| | CRKL; ATF4; AKT3; PRKCA; HGF |
| GM-CSF | LYN; ELK1; MAPK1; PTPN11; AKT2; PIK3CA; CAMK2A; STAT5B; |
| Signaling | PIK3CB; PIK3C3; GNB2L1; BCL2L1; MAPK3; ETS1; KRAS; RUNX1; |
| | PIM1; PIK3C2A; RAF1; MAP2K2; AKT1; JAK2; PIK3R1; STAT3; |
| | MAP2K1; CCND1; AKT3; S TAT1 |
| Amyotrophic | BID; IGF1; RAC1; BIRC4; PGF; CAPNS1; CAPN2; PIK3CA; BCL2; |
| Lateral Sclerosis | PIK3CB; PIK3C3; BCL2L1; CAPN1; PIK3C2A; TP53; CASP9; PIK3R1; |
| Signaling | RAB5A; CASP1; APAF1; VEGFA; BIRC2; BAX; AKT3; CASP3; BIRC3 |
| JAK/Stat | PTPN1; MAPK1; PTPN11; AKT2; PIK3CA; STAT5B; PIK3CB; PIK3C3; |
| Signaling | MAPK3; KRAS; SOCS1; STAT5A; PTPN6; PIK3C2A; RAF1; CDKN1A; |
| | MAP2K2; JAK1; AKT1; JAK2; PIK3R1; STAT3; MAP2K1; FRAP1; |
| | AKT3; STAT1 |
| Nicotinate and | PRKCE; IRAK1; PRKAA2; EIF2AK2; GRK6; MAPK1; PLK1; AKT2; |
| Nicotinamide | CDK8; MAPK8; MAPK3; PRKCD; PRKAA1; PBEF1; MAPK9; CDK2; |
| Metabolism | PIM1; DYRK1A; MAP2K2; MAP2K1; PAK3; NT5E; TTK; CSNK1A1; |
| | BRAF; SGK |
| Chemokine | CXCR4; ROCK2; MAPK1; PTK2; FOS; CFL1; GNAQ; CAMK2A; |
| Signaling | CXCL12; MAPK8; MAPK3; KRAS; MAPK13; RHOA; CCR3; SRC; |
| | PPP1CC; MAPK14; NOX1; RAF1; MAP2K2; MAP2K1; JUN; CCL2; |
| | PRKCA |
| IL-2 Signaling | ELK1; MAPK1; PTPN11; AKT2; PIK3CA; SYK; FOS; STAT5B; PIK3CB; |
| | PIK3C3; MAPK8; MAPK3; KRAS; SOCS1; STAT5A; PIK3C2A; LCK; |
| | RAF1; MAP2K2; JAK1; AKT1; PIK3R1; MAP2K1; JUN; AKT3 |
| Synaptic Long | PRKCE; IGF1; PRKCZ; PRDX6; LYN; MAPK1; GNAS; PRKCI; GNAQ; |
| Term Depression | PPP2R1A; IGF1R; PRKD1; MAPK3; KRAS; GRN; PRKCD; NOS53; |
| | NOS2A; PPP2CA; YWHAZ; RAF1; MAP2K2; PPP2R5C; MAP2K1; |
| | PRKCA |
| Estrogen Receptor | TAF4B; EP300; CARM1; PCAF; MAPK1; NCOR2; SMARCA4; MAPK3; |
| Signaling | NRIP1; KRAS; SRC; NR3C1; HDAC3; PPARGC1A; RBM9; NCOA3; |
| | RAF1; CREBBP; MAP2K2; NCOA2; MAP2K1; PRKDC; ESR1; ESR2 |
| Protein | TRAF6; SMURF1; BIRC4; BRCA1; UCHL1; NEDD4; CBL; UBE2I; |
| Ubiquitination | BTRC; HSPA5; USP7; USP10; FBW7; USP9X; STUB1; USP22; B2M; |
| Pathway | BIRC2; PARK2; USP8; USP1; VHL; HSP90AA1; BIRC3 |
| IL-10 Signaling | TRAF6; CCR1; ELK1; IKBKB; SP1; FOS; NFKB2; MAP3K14; MAPK8; |
| | MAPK13; RELA; MAPK14; TNF; IKBKG; RELB; MAP3K7; JAK1; |
| | CHUK; STAT3; NFKB1; JUN; IL1R1; IL6 |
| VDR/RXR | PRKCE; EP300; PRKCZ; RXRA; GADD45A; HES1; NCOR2; SP1; |
| Activation | PRKCI; CDKN1B; PRKD1; PRKCD; RUNX2; KLF4; YY1; NCOA3; |
| | CDKN1A; NCOA2; SPP1; LRP5; CEBPB; FOXO1; PRKCA |
| TGF-beta | EP300; SMAD2; SMURF1; MAPK1; SMAD3; SMAD1; FOS; MAPK8; |
| Signaling | MAPK3; KRAS; MAPK9; RUNX2; SERPINE1; RAF1; MAP3K7; |
| | CREBBP; MAP2K2; MAP2K1; TGFBR1; SMAD4; JUN; SMAD5 |
| Toll-like Receptor | IRAK1; EIF2AK2; MYD88; TRAF6; PPARA; ELK1; IKBKB; FOS; |
| Signaling | NFKB2; MAP3K14; MAPK8; MAPK13; RELA; TLR4; MAPK14; |
| | IKBKG; RELB; MAP3K7; CHUK; NFKB1; TLR2; JUN |
| p38 MAPK | HSPB1; IRAK1; TRAF6; MAPKAPK2; ELK1; FADD; FAS; CREB1; |
| Signaling | DDIT3; RPS6KA4; DAXX; MAPK13; TRAF2; MAPK14; TNF; MAP3K7; |
| | TGFBR1; MYC; ATF4; IL1R1; SRF; STAT1 |
| Neurotrophin/TRK | NTRK2; MAPK1; PTPN11; PIK3CA; CREB1; FOS; PIK3CB; PIK3C3; |
| Signaling | MAPK8; MAPK3; KRAS; PIK3C2A; RAF1; MAP2K2; AKT1; PIK3R1; |
| | PDPK1; MAP2K1; CDC42; JUN; ATF4 |
| FXR/RXR | INS; PPARA; FASN; RXRA; AKT2; SDC1; MAPK8; APOB; MAPK10; |
| Activation | PPARG; MTTP; MAPK9; PPARGC1A; TNF; CREBBP; AKT1; SREBF1; |
| | FGFR4; AKT3; FOXO1 |
| Synaptic Long | PRKCE; RAP1A; EP300; PRKCZ; MAPK1; CREB1; PRKCI; GNAQ; |
| Term Potentiation | CAMK2A; PRKD1; MAPK3; KRAS; PRKCD; PPP1CC; RAF1; CREBBP; |
| | MAP2K2; MAP2K1; ATF4; PRKCA |
| Calcium Signaling | RAP1A; EP300; HDAC4; MAPK1; HDAC5; CREB1; CAMK2A; MYH9; |
| | MAPK3; HDAC2; HDAC7A; HDAC11; HDAC9; HDAC3; CREBBP; |
| | CALR; CAMKK2; ATF4; HDAC6 |
| EGF Signaling | ELK1; MAPK1; EGFR; PIK3CA; FOS; PIK3CB; PIK3C3; MAPK8; |
| | MAPK3; PIK3C2A; RAF1; JAK1; PIK3R1; STAT3; MAP2K1; JUN; |
| | PRKCA; SRF; STAT1 |
| Hypoxia Signaling | EDN1; PTEN; EP300; NQO1; UBE2I; CREB1; ARNT; HIF1A; SLC2A4; |
| in the | NOS3; TP53; LDHA; AKT1; ATM; VEGFA; JUN; ATF4; VHL; |
| HSP90AA1 | |
| Cardiovascular | |
| System | |
| LPS/IL-1 | IRAK1; MYD88; TRAF6; PPARA; RXRA; ABCA1; MAPK8; ALDH1A1; |
| Mediated | GSTP1; MAPK9; ABCB1; TRAF2; TLR4; TNF; MAP3K7; NR1H2; |
| | SREBF1; JUN; IL1R1 |
| Inhibition of RXR | |
| Function | |
| LXR/RXR | FASN; RXRA; NCOR2; ABCA1; NFKB2; IRF3; RELA; NOS2A; TLR4; |
| Activation | TNF; RELB; LDLR; NR1H2; NFKB1; SREBF1; IL1R1; CCL2; IL6; |
| | MIMP9 |
| Amyloid | PRKCE; CSNK1E; MAPK1; CAPNS1; AKT2; CAPN2; CAPN1; MAPK3; |
| Processing | MAPK13; MAPT; MAPK14; AKT1; PSEN1; CSNK1A1; GSK3B; AKT3; |
| | APP |
| IL-4 Signaling | AKT2; PIK3CA; PIK3CB; PIK3C3; IRS1; KRAS; SOCS1; PTPN6; |
| | NR3C1; PIK3C2A; JAK1; AKT1; JAK2; PIK3R1; FRAP1; AKT3; |
| | RPS6KB1 |
| Cell Cycle: G2/M | EP300; PCAF; BRCA1; GADD45A; PLK1; BTRC; CHEK1; ATR; |
| DNA Damage | CHEK2; YWHAZ; TP53; CDKN1A; PRKDC; ATM; SFN; CDKN2A |
| Checkpoint | |
| Regulation | |
| Nitric Oxide | KDR; FLT1; PGF; AKT2; PIK3CA; PIK3CB; PIK3C3; CAV1; PRKCD; |
| Signaling in the | NOS3; PIK3C2A; AKT1; PIK3R1; VEGFA; AKT3; HSP90AA1 |
| Cardiovascular | |
| System | |
| Purine | NME2; SMARCA4; MYH9; RRM2; ADAR; EIF2AK4; PKM2; ENTPD1; |
| Metabolism | RAD51; RRM2B; TJP2; RAD51C; NT5E; POLD1; NME1 |
| cAMP-mediated | RAP1A; MAPK1; GNAS; CREB1; CAMK2A; MAPK3; SRC; RAF1; |
| Signaling | MAP2K2; STAT3; MAP2K1; BRAF; ATF4 |
| Mitochondrial | SOD2; MAPK8; CASP8; MAPK10; MAPK9; CASP9; PARK7; PSEN1; |
| Dysfunction | PARK2; APP; CASP3 |
| Notch Signaling | HES1; JAG1; NUMB; NOTCH4; ADAM17; NOTCH2; PSEN1; NOTCH3; |
| | NOTCH1; DLL4 |
| Endoplasmic | HSPA5; MAPK8; XBP1; TRAF2; ATF6; CASP9; ATF4; EIF2AK3; |
| Reticulum Stress | CASP3 |
| Pathway | |
| Pyrimidine | NME2; AICDA; RRM2; EIF2AK4; ENTPD1; RRM2B; NT5E; POLD1; |
| Metabolism | NME1 |
| Parkinson's | UCHL1; MAPK8; MAPK13; MAPK14; CASP9; PARK7; PARK2; CASP3 |
| Signaling | |
| Cardiac & Beta | GNAS; GNAQ; PPP2R1A; GNB2L1; PPP2CA; PPP1CC; PPP2R5C |
| Adrenergic | |
| Signaling | |
| Glycolysis/ | HK2; GCK; GPI; ALDH1A1; PKM2; LDHA; HK1 |
| Gluconeogenesis | |
| Interferon | IRF1; SOCS1; JAK1; JAK2; IFITM1; STAT1; IFIT3 |
| Signaling | |
| Sonic Hedgehog | ARRB2; SMO; GLI2; DYRK1A; GLI1; GSK3B; DYRK1B |
| Signaling | |
| Glycerophospholipid | PLD1; GRN; GPAM; YWHAZ; SPHK1; SPHK2 |
| Metabolism | |
| Phospholipid | PRDX6; PLD1; GRN; YWHAZ; SPHK1; SPHK2 |
| Degradation | |
| Tryptophan | SIAH2; PRMT5; NEDD4; ALDH1A1; CYP1B1; SIAH1 |
| Metabolism | |
| Lysine | SUV39H1; EHMT2; NSD1; SETD7; PPP2R5C |
| Degradation | |
| Nucleotide | ERCC5; ERCC4; XPA; XPC; ERCC1 |
| Excision Repair | |
| Pathway | |
| Starch and | UCHL1; HK2; GCK; GPI; HK1 |
| Sucrose | |
| Metabolism | |
| Aminosugars | NQO1; HK2; GCK; HK1 |
| Metabolism | |
| Arachidonic Acid | PRDX6; GRN; YWHAZ; CYP1B1 |
| Metabolism | |
| Circadian Rhythm | CSNK1E; CREB1; ATF4; NR1D1 |
| Signaling | |
| Coagulation | BDKRB1; F2R; SERPINE1; F3 |
| System | |
| Dopamine | PPP2R1A; PPP2CA; PPP1CC; PPP2R5C |
| Receptor | |
| Signaling | |
| Glutathione | IDH2; GSTP1; ANPEP; IDH1 |
| Metabolism | |
| Glycerolipid | ALDH1A1; GPAM; SPHK1; SPHK2 |
| Metabolism | |
| Linoleic Acid | PRDX6; GRN; YWHAZ; CYP1B1 |
| Metabolism | |
| Methionine | DNMT1; DNMT3B; AHCY; DNMT3A |
| Metabolism | |
| Pyruvate | GLO1; ALDH1A1; PKM2; LDHA |
| Metabolism | |
| Arginine and | ALDH1A1; NOS3; NOS2A |
| Proline | |
| Metabolism | |
| Eicosanoid | PRDX6; GRN; YWHAZ |
| Signaling | |
| Fructose and | HK2; GCK; HK1 |
| Mannose | |
| Metabolism | |
| Galactose | HK2; GCK; HK1 |
| Metabolism | |
| Stilbene, | PRDX6; PRDX1; TYR |
| Coumarine and | |
| Lignin | |
| Biosynthesis | |
| Antigen | CALR; B2M |
| Presentation | |
| Pathway | |
| Biosynthesis of | NQO1; DHCR7 |
| Steroids | |
| Butanoate | ALDH1A1; NLGN1 |
| Metabolism | |
| Citrate Cycle | IDH2; IDH1 |
| Fatty Acid | ALDH1A1; CYP1B1 |
| Metabolism | |
| Glycerophospholipid | PRDX6; CHKA |
| Metabolism | |
| Histidine | PRMT5; ALDH1A1 |
| Metabolism | |
| Inositol | ERO1L; APEX1 |
| Metabolism | |
| Metabolism of | GSTP1; CYP1B1 |
| Xenobiotics by | |
| Cytochrome p450 | |
| Methane | PRDX6; PRDX1 |
| Metabolism | |
| Phenylalanine | PRDX6; PRDX1 |
| Metabolism | |
| Propanoate | ALDH1A1; LDHA |
| Metabolism | |
| Selenoamino Acid | PRMT5; AHCY |
| Metabolism | |
| Sphingolipid | SPHK1; SPHK2 |
| Metabolism | |
| Aminophosphonate | PRMT5 |
| Metabolism | |
| Androgen and | PRMT5 |
| Estrogen | |
| Metabolism | |
| Ascorbate and | ALDH1A1 |
| Aldarate | |
| Metabolism | |
| Bile Acid | ALDH1A1 |
| Biosynthesis | |
| Cysteine | LDHA |
| Metabolism | |
| Fatty Acid | FASN |
| Biosynthesis | |
| Glutamate | GNB2L1 |
| Receptor | |
| Signaling | |
| NRF2-mediated | PRDX1 |
| Oxidative Stress | |
| Response | |
| Pentose Phosphate | GPI |
| Pathway | |
| Pentose and | UCHL1 |
| Glucuronate | |
| Interconversions | |
| Retinol | ALDH1A1 |
| Metabolism | |
| Riboflavin | TYR |
| Metabolism | |
| Tyrosine | PRMT5, TYR |
| Metabolism | |
| Ubiquinone | PRMT5 |
| Biosynthesis | |
| Valine, Leucine | ALDH1A1 |
| and Isoleucine | |
| Degradation | |
| Glycine, Serine | CHKA |
| and Threonine | |
| Metabolism | |
| Lysine | ALDH1A1 |
| Degradation | |
| Pain/Taste | TRPM5; TRPA1 |
| Pain | TRPM7; TRPC5; TRPC6; TRPC1; Cnr1; cnr2; Grk2; Trpa1; Pomc; Cgrp; |
| | Crf; Pka; Era; Nr2b; TRPM5; Prkaca; Prkacb; Prkar1a; Prkar2a |
| Mitochondrial | AIF; CytC; SMAC (Diablo); Aifm-1; Aifm-2 |
| Function | |
| Developmental | BMP-4; Chordin (Chrd); Noggin (Nog); WNT (Wnt2; Wnt2b; Wnt3a; |
| Neurology | Wnt4; Wnt5a; Wnt6; Wnt7b; Wnt8b; Wnt9a; Wnt9b; Wnt10a; Wnt10b; |
| | Wnt16); beta-catenin; Dkk-1; Frizzled related proteins; Otx-2; Gbx2; FGF- |
| | 8; Reelin; Dab 1; unc-86 (Pou4f1 or Brn3a); Numb; Reln |

[1597] Embodiments of the invention also relate to methods and compositions related to knocking out genes, amplifying genes and repairing particular mutations associated with DNA repeat instability and neurological disorders (Robert D. Wells, Tetsuo Ashizawa, Genetic Instabilities and Neurological Diseases, Second Edition, Academic Press, Oct. 13, 2011—Medical). Specific aspects of tandem repeat sequences have been found to be responsible for more than twenty human diseases (New insights into repeat instability: role of RNA.DNA hybrids. McIvor E I, Polak U, Napierala M. RNA Biol. 2010 September-October; 7(5):551-8). The present effector protein systems may be harnessed to correct these defects of genomic instability.

[1598] Several further aspects of the invention relate to correcting defects associated with a wide range of genetic diseases which are further described on the website of the National Institutes of Health under the topic subsection Genetic Disorders (website at health.nih.gov/topic/GeneticDisorders). The genetic brain diseases may include but are not limited to Adrenoleukodystrophy, Agenesis of the Corpus Callosum, Aicardi Syndrome, Alpers' Disease, Alzheimer's Disease, Barth Syndrome, Batten Disease, CADASIL, Cerebellar Degeneration, Fabry's Disease, Gerstmann-Straussler-Scheinker Disease, Huntington's Disease and other Triplet Repeat Disorders, Leigh's Disease, Lesch-Nyhan Syndrome, Menkes Disease, Mitochondrial Myopathies and NINDS Colpocephaly. These diseases are further described on the website of the National Institutes of Health under the subsection Genetic Brain Disorders.

[1599] Throughout this disclosure there has been mention of CRISPR or CRISPR-Cas complexes or systems. CRISPR systems or complexes can target nucleic acid molecules, e.g., CRISPR-C2c1 complexes can target and cleave or nick or simply sit upon a target DNA molecule (depending if the C2c1 has mutations that render it a nickase or “dead”). Such systems or complexes are amenable for achieving tissue-specific and temporally controlled targeted deletion of candidate disease genes. Examples include but are not limited to genes involved in cholesterol and fatty acid metabolism, amyloid diseases, dominant negative diseases, latent viral infections, among other disorders. Accordingly, target sequences for such systems or complexes can be in candidate disease genes, e.g.:

TABLE 10
Diseases and Targets

| | | | | Mechan- | |
|---|---|---|---|---|---|
| Disease | GENE | SPACER | PAM | ism | References |
| Hyper- | HMG- | GCCAAATT | CGG | Knock- | Fluvastatin: |
| choles- | CR | GGACGACC | | out | a review of |
| terolemia | | CTCG | | | its pharm- |
| | | (SEQ ID | | | acology and |
| | | NO: 480) | | | use in the |
| | | | | | management |
| | | | | | of hyper- |
| | | | | | cholester- |
| | | | | | olemia. |
| | | | | | (Plosker |
| | | | | | GL et al. |
| | | | | | Drugs |
| | | | | | 1996, |
| | | | | | 51(3): |
| | | | | | 433-459) |
| Hyper- | SQLE | CGAGGAGA | TGG | Knock- | Potential |
| choles- | | CCCCCGTT | | out | role of |
| terolemia | | TCGG | | | nonstatin |
| | | (SEQ ID | | | cholesterol |
| | | NO: 481) | | | lowering |
| | | | | | agents |
| | | | | | (Trapani |
| | | | | | et al. |
| | | | | | IUBMB Life, |
| | | | | | Volume 63, |
| | | | | | Issue 11, |
| | | | | | pages |
| | | | | | 964-971, |
| | | | | | November |
| | | | | | 2011) |
| Hyper- | DGAT | CCCGCCGC | AGG | Knock- | DGAT1 |
| lipidemia | 1 | CGCCGTGG | | out | inhibitors |
| | | CTCG | | | as anti- |
| | | (SEQ ID | | | obesity |
| | | NO: 482) | | | and anti- |
| | | | | | diabetic |
| | | | | | agents. |
| | | | | | (Birch A M |
| | | | | | et al. |
| | | | | | Current |
| | | | | | Opinion |
| | | | | | in Drug |
| | | | | | Discovery |
| | | | | | & Develop- |
| | | | | | ment |
| | | | | | [2010, |
| | | | | | 13(4): |
| | | | | | 489-496) |
| Leukemia | BCR- | TGAGCTCT | AGG | Knock- | Killing of |
| | ABL | ACGAGATC | | out | leukemic |
| | | CACA | | | cells |
| | | (SEQ ID | | | with a |
| | | NO: 483) | | | BCR/ABL |
| | | | | | fusion |
| | | | | | gene by |
| | | | | | RNA |
| | | | | | inter- |
| | | | | | ference |
| | | | | | (RNAi). |
| | | | | | (Fuchs |
| | | | | | et al. |
| | | | | | Oncogene |
| | | | | | 2002, |
| | | | | | 21(37): |
| | | | | | 5716-5724) |

[1600] Thus, the present invention, with regard to CRISPR or CRISPR-Cas complexes contemplates correction of hematopoietic disorders. For example, Severe Combined Immune Deficiency (SCID) results from a defect in lymphocytes T maturation, always associated with a functional defect in lymphocytes B(Cavazzana-Calvo et al., Annu. Rev. Med., 2005, 56, 585-602; Fischer et al., Immunol. Rev., 2005, 203, 98-109). In the case of Adenosine Deaminase (ADA) deficiency, one of the SCID forms, patients can be treated by injection of recombinant Adenosine Deaminase enzyme. Since the ADA gene has been shown to be mutated in SCID patients (Giblett et al., Lancet, 1972, 2, 1067-1069), several other genes involved in SCID have been identified (Cavazzana-Calvo et al., Annu. Rev. Med., 2005, 56, 585-602; Fischer et al., Immunol. Rev., 2005, 203, 98-109). There are four major causes for SCID: (i) the most frequent form of SCID, SCID-X1 (X-linked SCID or X-SCID), is caused by mutation in the IL2RG gene, resulting in the absence of mature T lymphocytes and NK cells. IL2RG encodes the gamma C protein (Noguchi, et al., Cell, 1993, 73, 147-157), a common component of at least five interleukin receptor complexes. These receptors activate several targets through the JAK3 kinase (Macchi et al., Nature, 1995, 377, 65-68), which inactivation results in the same syndrome as gamma C inactivation; (ii) mutation in the ADA gene results in a defect in purine metabolism that is lethal for lymphocyte precursors, which in turn results in the quasi absence of B, T and NK cells; (iii) V(D)J recombination is an essential step in the maturation of immunoglobulins and T lymphocytes receptors (TCRs). Mutations in Recombination Activating Gene 1 and 2 (RAG1 and RAG2) and Artemis, three genes involved in this process, result in the absence of mature T and B lymphocytes; and (iv) Mutations in other genes such as CD45, involved in T cell specific signaling have also been reported, although they represent a minority of cases (Cavazzana-Calvo et al., Annu. Rev. Med., 2005, 56, 585-602; Fischer et al., Immunol. Rev., 2005, 203, 98-109). In aspect of the invention, relating to CRISPR or CRISPR-Cas complexes contemplates system, the invention contemplates that it may be used to correct ocular defects that arise from several genetic mutations further described in Genetic Diseases of the Eye, Second Edition, edited by Elias I. Traboulsi, Oxford University Press, 2012. Non-limiting examples of ocular defects to be corrected include macular degeneration (MD), retinitis pigmentosa (RP). Non-limiting examples of genes and proteins associated with ocular defects include but are not limited to the following proteins: (ABCA4) ATP-binding cassette, sub-family A (ABC1), member 4 ACHM1 achromatopsia (rod monochromacy) 1 ApoE Apolipoprotein E (ApoE) C1QTNF5 (CTRP5) Clq and tumor necrosis factor related protein 5 (C1QTNF5) C2 Complement component 2 (C2) C3 Complement components (C3) CCL2 Chemokine (C-C motif) Ligand 2 (CCL2) CCR2 Chemokine (C-C motif) receptor 2 (CCR2) CD36 Cluster of Differentiation 36 CFB Complement factor B CFH Complement factor CFH H CFHR1 complement factor H-related 1 CFHR3 complement factor H-related 3 CNGB3 cyclic nucleotide gated channel beta 3 CP ceruloplasmin (CP) CRP C reactive protein (CRP) CST3 cystatin C or cystatin 3 (CST3) CTSD Cathepsin D (CTSD) CX3CR1 chemokine (C-X3-C motif) receptor 1 ELOVL4 Elongation of very long chain fatty acids 4 ERCC6 excision repair cross-complementing rodent repair deficiency, complementation group 6 FBLN5 Fibulin-5 FBLN5 Fibulin 5 FBLN6 Fibulin 6 FSCN2 fascin (FSCN2) HMCN1 Hemicentrin 1 HMCN1 hemicentin 1 HTRA1 HtrA serine peptidase 1 (HTRA1) HTRA1 HtrA serine peptidase 1 IL-6 Interleukin 6 IL-8 Interleukin 8 LOC387715 Hypothetical protein PLEKHA1 Pleckstrin homology domain-containing family A member 1 (PLEKHA1) PROM1 Prominin 1(PROM1 or CD133) PRPH2 Peripherin-2 RPGR retinitis pigmentosa GTPase regulator SERPINGI serpin peptidase inhibitor, clade G, member 1 (C1-inhibitor) TCOF1 Treacle TIMP3 Metalloproteinase inhibitor 3 (TIMP3) TLR3 Toll-like receptor 3 The present invention, with regard to CRISPR or CRISPR-Cas complexes contemplates also contemplates delivering to the heart. For the heart, a myocardium tropic adena-associated virus (AAVM) is preferred, in particular AAVM41 which showed preferential gene transfer in the heart (see, e.g., Lin-Yanga et al., PNAS, Mar. 10, 2009, vol. 106, no. 10). For example, US Patent Publication No. 20110023139, describes use of zinc finger nucleases to genetically modify cells, animals and proteins associated with cardiovascular disease. Cardiovascular diseases generally include high blood pressure, heart attacks, heart failure, and stroke and TIA. By way of example, the chromosomal sequence may comprise, but is not limited to, IL1B (interleukin 1, beta), XDH (xanthine dehydrogenase), TP53 (tumor protein p53), PTGIS (prostaglandin 12 (prostacyclin) synthase), MB (myoglobin), IL4 (interleukin 4), ANGPT1 (angiopoietin 1), ABCG8 (ATP-binding cassette, sub-family G (WHITE), member 8), CTSK (cathepsin K), PTGIR (prostaglandin 12 (prostacyclin) receptor (IP)), KCNJ11 (potassium inwardly-rectifying channel, subfamily J, member 11), INS (insulin), CRP (C-reactive protein, pentraxin-related), PDGFRB (platelet-derived growth factor receptor, beta polypeptide), CCNA2 (cyclin A2), PDGFB (platelet-derived growth factor beta polypeptide (simian sarcoma viral (v-sis) oncogene homolog)), KCNJ5 (potassium inwardly-rectifying channel, subfamily J, member 5), KCNN3 (potassium intermediate/small conductance calcium-activated channel, subfamily N, member 3), CAPN10 (calpain 10), PTGES (prostaglandin E synthase), ADRA2B (adrenergic, alpha-2B-, receptor), ABCG5 (ATP-binding cassette, sub-family G (WHITE), member 5), PRDX2 (peroxiredoxin 2), CAPN5 (calpain 5), PARP14 (poly (ADP-ribose) polymerase family, member 14), MEX3C (mex-3 homolog C (C. elegans)), ACE angiotensin I converting enzyme (peptidyl-dipeptidase A) 1), TNF (tumor necrosis factor (TNF superfamily, member 2)), IL6 (interleukin 6 (interferon, beta 2)), STN (statin), SERPINE1 (serpin peptidase inhibitor, clade E (nexin, plasminogen activator inhibitor type 1), member 1), ALB (albumin), ADIPOQ (adiponectin, C1Q and collagen domain containing), APOB (apolipoprotein B (including Ag(x) antigen)), APOE (apolipoprotein E), LEP (leptin), MTHFR (5,10-methylenetetrahydrofolate reductase (NADPH)), APOA1 (apolipoprotein A-I), EDN1 (endothelin 1), NPPB (natriuretic peptide precursor B), NOS3 (nitric oxide synthase 3 (endothelial cell)), PPARG (peroxisome proliferator-activated receptor gamma), PLAT (plasminogen activator, tissue), PTGS2 (prostaglandin-endoperoxide synthase 2 (prostaglandin G/H synthase and cyclooxygenase)), CETP (cholesteryl ester transfer protein, plasma), AGTR1 (angiotensin II receptor, type 1), HMGCR (3-hydroxy-3-methylglutaryl-Coenzyme A reductase), IGF1 (insulin-like growth factor 1 (somatomedin C)), SELE (selectin E), REN (renin), PPARA (peroxisome proliferator-activated receptor alpha), PON1 (paraoxonase 1), KNG1 (kininogen 1), CCL2 (chemokine (C-C motif) ligand 2), LPL (lipoprotein lipase), VWF (von Willebrand factor), F2 (coagulation factor II (thrombin)), ICAM1 (intercellular adhesion molecule 1), TGFB1 (transforming growth factor, beta 1), NPPA (natriuretic peptide precursor A), IL10 (interleukin 10), EPO (erythropoietin), SOD1 (superoxide dismutase 1, soluble), VCAM1 (vascular cell adhesion molecule 1), IFNG (interferon, gamma), LPA (lipoprotein, Lp(a)), MPO (myeloperoxidase), ESR1 (estrogen receptor 1), MAPK1 (mitogen-activated protein kinase 1), HP (haptoglobin), F3 (coagulation factor III (thromboplastin, tissue factor)), CST3 (cystatin C), COG2 (component of oligomeric golgi complex 2), MMP9 (matrix metallopeptidase 9 (gelatinase B, 92 kDa gelatinase, 92 kDa type IV collagenase)), SERPINC (serpin peptidase inhibitor, clade C (antithrombin), member 1), F8 (coagulation factor VIII, procoagulant component), HMOX1 (heme oxygenase (decycling) 1), APOC3 (apolipoprotein C-III), IL8 (interleukin 8), PROK (prokineticin 1), CBS (cystathionine-beta-synthase), NOS2 (nitric oxide synthase 2, inducible), TLR4 (toll-like receptor 4), SELP (selectin P (granule membrane protein 140 kDa, antigen CD62)), ABCA1 (ATP-binding cassette, sub-family A (ABC1), member 1), AGT (angiotensinogen (serpin peptidase inhibitor, clade A, member 8)), LDLR (low density lipoprotein receptor), GPT (glutamic-pyruvate transaminase (alanine aminotransferase)), VEGFA (vascular endothelial growth factor A), NR3C2 (nuclear receptor subfamily 3, group C, member 2), IL18 (interleukin 18 (interferon-gamma-inducing factor)), NOS1 (nitric oxide synthase 1 (neuronal)), NR3C1 (nuclear receptor subfamily 3, group C, member 1 (glucocorticoid receptor)), FGB (fibrinogen beta chain), HGF (hepatocyte growth factor (hepapoietin A; scatter factor)), ILlA (interleukin 1, alpha), RETN (resistin), AKT1 (v-akt murine thymoma viral oncogene homolog 1), LIPC (lipase, hepatic), HSPD1 (heat shock 60 kDa protein 1 (chaperonin)), MAPK14 (mitogen-activated protein kinase 14), SPP1 (secreted phosphoprotein 1), ITGB3 (integrin, beta 3 (platelet glycoprotein 111a, antigen CD61)), CAT (catalase), UTS2 (urotensin 2), THBD (thrombomodulin), F10 (coagulation factor X), CP (ceruloplasmin (ferroxidase)), TNFRSF11B (tumor necrosis factor receptor superfamily, member 11b), EDNRA (endothelin receptor type A), EGFR (epidermal growth factor receptor (erythroblastic leukemia viral (v-erb-b) oncogene homolog, avian)), MMP2 (matrix metallopeptidase 2 (gelatinase A, 72 kDa gelatinase, 72 kDa type IV collagenase)), PLG (plasminogen), NPY (neuropeptide Y), RHOD (ras homolog gene family, member D), MAPK8 (mitogen-activated protein kinase 8), MYC (v-myc myelocytomatosis viral oncogene homolog (avian)), FN1 (fibronectin 1), CMA1 (chymase 1, mast cell), PLAU (plasminogen activator, urokinase), GNB3 (guanine nucleotide binding protein (G protein), beta polypeptide 3), ADRB2 (adrenergic, beta-2-, receptor, surface), APOA5 (apolipoprotein A-V), SOD2 (superoxide dismutase 2, mitochondrial), F5 (coagulation factor V (proaccelerin, labile factor)), VDR (vitamin D (1,25-dihydroxyvitamin D3) receptor), ALOX5 (arachidonate 5-lipoxygenase), HLA-DRB1 (major histocompatibility complex, class II, DR beta 1), PARP1 (poly (ADP-ribose) polymerase 1), CD40LG (CD40 ligand), PON2 (paraoxonase 2), AGER (advanced glycosylation end product-specific receptor), IRS1 (insulin receptor substrate 1), PTGS1 (prostaglandin-endoperoxide synthase 1 (prostaglandin G/H synthase and cyclooxygenase)), ECE1 (endothelin converting enzyme 1), F7 (coagulation factor VII (serum prothrombin conversion accelerator)), URN (interleukin 1 receptor antagonist), EPHX2 (epoxide hydrolase 2, cytoplasmic), IGFBP1 (insulin-like growth factor binding protein 1), MAPK10 (mitogen-activated protein kinase 10), FAS (Fas (TNF receptor superfamily, member 6)), ABCB1 (ATP-binding cassette, sub-family B (MDR/TAP), member 1), JUN (jun oncogene), IGFBP3 (insulin-like growth factor binding protein 3), CD14 (CD14 molecule), PDE5A (phosphodiesterase 5A, cGMP-specific), AGTR2 (angiotensin II receptor, type 2), CD40 (CD40 molecule, TNF receptor superfamily member 5), LCAT (lecithin-cholesterol acyltransferase), CCR5 (chemokine (C-C motif) receptor 5), MMP1 (matrix metallopeptidase 1 (interstitial collagenase)), TIMP1 (TIMP metallopeptidase inhibitor 1), ADM (adrenomedullin), DYT10 (dystonia 10), STAT3 (signal transducer and activator of transcription 3 (acute-phase response factor)), MMP3 (matrix metallopeptidase 3 (stromelysin 1, progelatinase)), ELN (elastin), USF1 (upstream transcription factor 1), CFH (complement factor H), HSPA4 (heat shock 70 kDa protein 4), MMP12 (matrix metallopeptidase 12 (macrophage elastase)), MME (membrane metallo-endopeptidase), F2R (coagulation factor II (thrombin) receptor), SELL (selectin L), CTSB (cathepsin B), ANXA5 (annexin A5), ADRB1 (adrenergic, beta-1-, receptor), CYBA (cytochrome b-245, alpha polypeptide), FGA (fibrinogen alpha chain), GGT1 (gamma-glutamyltransferase 1), LIPG (lipase, endothelial), HIF1A (hypoxia inducible factor 1, alpha subunit (basic helix-loop-helix transcription factor)), CXCR4 (chemokine (C-X-C motif) receptor 4), PROC (protein C (inactivator of coagulation factors Va and VIIIa)), SCARB1 (scavenger receptor class B, member 1), CD79A (CD79a molecule, immunoglobulin-associated alpha), PLTP (phospholipid transfer protein), ADD1 (adducin 1 (alpha)), FGG (fibrinogen gamma chain), SAA1 (serum amyloid A1), KCNH2 (potassium voltage-gated channel, subfamily H (eag-related), member 2), DPP4 (dipeptidyl-peptidase 4), G6PD (glucose-6-phosphate dehydrogenase), NPR1 (natriuretic peptide receptor A/guanylate cyclase A (atrionatriuretic peptide receptor A)), VTN (vitronectin), KIAA0101 (KIAA0101), FOS (FBJ murine osteosarcoma viral oncogene homolog), TLR2 (toll-like receptor 2), PPIG (peptidylprolyl isomerase G (cyclophilin G)), IL1R1 (interleukin 1 receptor, type I), AR (androgen receptor), CYP1A1 (cytochrome P450, family 1, subfamily A, polypeptide 1), SERPINA1 (serpin peptidase inhibitor, clade A (alpha-1 antiproteinase, antitrypsin), member 1), MTR (5-methyltetrahydrofolate-homocysteine methyltransferase), RBP4 (retinol binding protein 4, plasma), APOA4 (apolipoprotein A-IV), CDKN2A (cyclin-dependent kinase inhibitor 2A (melanoma, p16, inhibits CDK4)), FGF2 (fibroblast growth factor 2 (basic)), EDNRB (endothelin receptor type B), ITGA2 (integrin, alpha 2 (CD49B, alpha 2 subunit of VLA-2 receptor)), CABINI (calcineurin binding protein 1), SHBG (sex hormone-binding globulin), HMGB1 (high-mobility group box 1), HSP90B2P (heat shock protein 90 kDa beta (Grp94), member 2 (pseudogene)), CYP3A4 (cytochrome P450, family 3, subfamily A, polypeptide 4), GJA1 (gap junction protein, alpha 1, 43 kDa), CAV1 (caveolin 1, caveolae protein, 22 kDa), ESR2 (estrogen receptor 2 (ER beta)), LTA (lymphotoxin alpha (TNF superfamily, member 1)), GDF15 (growth differentiation factor 15), BDNF (brain-derived neurotrophic factor), CYP2D6 (cytochrome P450, family 2, subfamily D, polypeptide 6), NGF (nerve growth factor (beta polypeptide)), SP1 (Sp transcription factor), TGIF1 (TGFB-induced factor homeobox 1), SRC (v-src sarcoma (Schmidt-Ruppin A-2) viral oncogene homolog (avian)), EGF (epidermal growth factor (beta-urogastrone)), PIK3CG (phosphoinositide-3-kinase, catalytic, gamma polypeptide), HLA-A (major histocompatibility complex, class I, A), KCNQ1 (potassium voltage-gated channel, KQT-like subfamily, member 1), CNR1 (cannabinoid receptor 1 (brain)), FBN1 (fibrillin 1), CHKA (choline kinase alpha), BEST1 (bestrophin 1), APP (amyloid beta (A4) precursor protein), CTNNB1 (catenin (cadherin-associated protein), beta 1, 88 kDa), IL2 (interleukin 2), CD36 (CD36 molecule (thrombospondin receptor)), PRKAB1 (protein kinase, AMP-activated, beta 1 non-catalytic subunit), TPO (thyroid peroxidase), ALDH7A1 (aldehyde dehydrogenase 7 family, member A1), CX3CR1 (chemokine (C-X3-C motif) receptor 1), TH (tyrosine hydroxylase), F9 (coagulation factor IX), GH1 (growth hormone 1), TF (transferrin), HFE (hemochromatosis), IL17A (interleukin 17A), PTEN (phosphatase and tensin homolog), GSTM1 (glutathione S-transferase mu 1), DMD (dystrophin), GATA4 (GATA binding protein 4), F13A1 (coagulation factor XIII, A1 polypeptide), TTR (transthyretin), FABP4 (fatty acid binding protein 4, adipocyte), PON3 (paraoxonase 3), APOC1 (apolipoprotein C-I), INSR (insulin receptor), TNFRSF1B (tumor necrosis factor receptor superfamily, member 1), HTR2A (5-hydroxytryptamine (serotonin) receptor 2A), CSF3 (colony stimulating factor 3 (granulocyte)), CYP2C9 (cytochrome P450, family 2, subfamily C, polypeptide 9), TXN (thioredoxin), CYP11B2 (cytochrome P450, family 11, subfamily B, polypeptide 2), PTH (parathyroid hormone), CSF2 (colony stimulating factor 2 (granulocyte-macrophage)), KDR (kinase insert domain receptor (a type III receptor tyrosine kinase)), PLA2G2A (phospholipase A2, group IIA (platelets, synovial fluid)), B2M (beta-2-microglobulin), THBS1 (thrombospondin 1), GCG (glucagon), RHOA (ras homolog gene family, member A), ALDH2 (aldehyde dehydrogenase 2 family (mitochondrial)), TCF7L2 (transcription factor 7-like 2 (T-cell specific, HMG-box)), BDKRB2 (bradykinin receptor B2), NFE2L2 (nuclear factor (erythroid-derived 2)-like 2), NOTCHI (Notch homolog 1, translocation-associated (Drosophila)), UGT1A1 (UDP glucuronosyltransferase 1 family, polypeptide A1), IFNA1 (interferon, alpha 1), PPARD (peroxisome proliferator-activated receptor delta), SIRT1 (sirtuin (silent mating type information regulation 2 homolog) 1 (S. cerevisiae)), GNRH1 (gonadotropin-releasing hormone 1 (luteinizing-releasing hormone)), PAPPA (pregnancy-associated plasma protein A, pappalysin 1), ARR3 (arrestin 3, retinal (X-arrestin)), NPPC (natriuretic peptide precursor C), AHSP (alpha hemoglobin stabilizing protein), PTK2 (PTK2 protein tyrosine kinase 2), IL13 (interleukin 13), MTOR (mechanistic target of rapamycin (serine/threonine kinase)), ITGB2 (integrin, beta 2 (complement component 3 receptor 3 and 4 subunit)), GSTT1 (glutathione S-transferase theta 1), IL6ST (interleukin 6 signal transducer (gp130, oncostatin M receptor)), CPB2 (carboxypeptidase B2 (plasma)), CYP1A2 (cytochrome P450, family 1, subfamily A, polypeptide 2), HNF4A (hepatocyte nuclear factor 4, alpha), SLC6A4 (solute carrier family 6 (neurotransmitter transporter, serotonin), member 4), PLA2G6 (phospholipase A2, group VI (cytosolic, calcium-independent)), TNFSF11 (tumor necrosis factor (ligand) superfamily, member 11), SLC8A1 (solute carrier family 8 (sodium/calcium exchanger), member 1), F2RL1 (coagulation factor II (thrombin) receptor-like 1), AKR1A1 (aldo-keto reductase family 1, member A1 (aldehyde reductase)), ALDH9A1 (aldehyde dehydrogenase 9 family, member A1), BGLAP (bone gamma-carboxyglutamate (gla) protein), MTTP (microsomal triglyceride transfer protein), MTRR (5-methyltetrahydrofolate-homocysteine methyltransferase reductase), SULT1A3 (sulfotransferase family, cytosolic, 1A, phenol-preferring, member 3), RAGE (renal tumor antigen), C4B (complement component 4B (Chido blood group), P2RY12 (purinergic receptor P2Y, G-protein coupled, 12), RNLS (renalase, FAD-dependent amine oxidase), CREB1 (cAMP responsive element binding protein 1), POMC (proopiomelanocortin), RAC1 (ras-related C3 botulinum toxin substrate 1 (rho family, small GTP binding protein Rac1)), LMNA (lamin NC), CD59 (CD59 molecule, complement regulatory protein), SCN5A (sodium channel, voltage-gated, type V, alpha subunit), CYP1B1 (cytochrome P450, family 1, subfamily B, polypeptide 1), MIF (macrophage migration inhibitory factor (glycosylation-inhibiting factor)), MMP13 (matrix metallopeptidase 13 (collagenase 3)), TIMP2 (TIMP metallopeptidase inhibitor 2), CYP19A1 (cytochrome P450, family 19, subfamily A, polypeptide 1), CYP21A2 (cytochrome P450, family 21, subfamily A, polypeptide 2), PTPN22 (protein tyrosine phosphatase, non-receptor type 22 (lymphoid)), MYH14 (myosin, heavy chain 14, non-muscle), MBL2 (mannose-binding lectin (protein C) 2, soluble (opsonic defect)), SELPLG (selectin P ligand), AOC3 (amine oxidase, copper containing 3 (vascular adhesion protein 1)), CTSL1 (cathepsin L1), PCNA (proliferating cell nuclear antigen), IGF2 (insulin-like growth factor 2 (somatomedin A)), ITGB1 (integrin, beta 1 (fibronectin receptor, beta polypeptide, antigen CD29 includes MDF2, MSK12)), CAST (calpastatin), CXCL12 (chemokine (C-X-C motif) ligand 12 (stromal cell-derived factor 1)), IGHE (immunoglobulin heavy constant epsilon), KCNE1 (potassium voltage-gated channel, Isk-related family, member 1), TFRC (transferrin receptor (p90, CD71)), COL1A1 (collagen, type I, alpha 1), COL1A2 (collagen, type I, alpha 2), IL2RB (interleukin 2 receptor, beta), PLA2G10 (phospholipase A2, group X), ANGPT2 (angiopoietin 2), PROCR (protein C receptor, endothelial (EPCR)), NOX4 (NADPH oxidase 4), HAMP (hepcidin antimicrobial peptide), PTPN11 (protein tyrosine phosphatase, non-receptor type 11), SLC2A1 (solute carrier family 2 (facilitated glucose transporter), member 1), IL2RA (interleukin 2 receptor, alpha), CCL5 (chemokine (C-C motif) ligand 5), IRF1 (interferon regulatory factor 1), CFLAR (CASP8 and FADD-like apoptosis regulator), CALCA (calcitonin-related polypeptide alpha), EIF4E (eukaryotic translation initiation factor 4E), GSTP1 (glutathione S-transferase pi 1), JAK2 (Janus kinase 2), CYP3A5 (cytochrome P450, family 3, subfamily A, polypeptide 5), HSPG2 (heparan sulfate proteoglycan 2), CCL3 (chemokine (C-C motif) ligand 3), MYD88 (myeloid differentiation primary response gene (88)), VIP (vasoactive intestinal peptide), SOAT1 (sterol O-acyltransferase 1), ADRBK1 (adrenergic, beta, receptor kinase 1), NR4A2 (nuclear receptor subfamily 4, group A, member 2), MMP8 (matrix metallopeptidase 8 (neutrophil collagenase)), NPR2 (natriuretic peptide receptor B/guanylate cyclase B (atrionatriuretic peptide receptor B)), GCH1 (GTP cyclohydrolase 1), EPRS (glutamyl-prolyl-tRNA synthetase), PPARGC1A (peroxisome proliferator-activated receptor gamma, coactivator 1 alpha), F12 (coagulation factor XII (Hageman factor)), PECAM1 (platelet/endothelial cell adhesion molecule), CCL4 (chemokine (C-C motif) ligand 4), SERPINA3 (serpin peptidase inhibitor, clade A (alpha-1 antiproteinase, antitrypsin), member 3), CASR (calcium-sensing receptor), GJA5 (gap junction protein, alpha 5, 40 kDa), FABP2 (fatty acid binding protein 2, intestinal), TTF2 (transcription termination factor, RNA polymerase II), PROS1 (protein S (alpha)), CTF1 (cardiotrophin 1), SGCB (sarcoglycan, beta (43 kDa dystrophin-associated glycoprotein)), YME1L1 (YME1-like 1 (S. cerevisiae)), CAMP (cathelicidin antimicrobial peptide), ZC3H12A (zinc finger CCCH-type containing 12A), AKR1B1 (aldo-keto reductase family 1, member B1 (aldose reductase)), DES (desmin), MMP7 (matrix metallopeptidase 7 (matrilysin, uterine)), AHR (aryl hydrocarbon receptor), CSF1 (colony stimulating factor 1 (macrophage)), HDAC9 (histone deacetylase 9), CTGF (connective tissue growth factor), KCNMA1 (potassium large conductance calcium-activated channel, subfamily M, alpha member 1), UGT1A (UDP glucuronosyltransferase 1 family, polypeptide A complex locus), PRKCA (protein kinase C, alpha), COMT (catechol-.beta.-methyltransferase), S100B (S100 calcium binding protein B), EGR1 (early growth response 1), PRL (prolactin), IL15 (interleukin 15), DRD4 (dopamine receptor D4), CAMK2G (calcium/calmodulin-dependent protein kinase II gamma), SLC22A2 (solute carrier family 22 (organic cation transporter), member 2), CCL11 (chemokine (C-C motif) ligand 11), PGF (B321 placental growth factor), THPO (thrombopoietin), GP6 (glycoprotein VI (platelet)), TACR1 (tachykinin receptor 1), NTS (neurotensin), HNF1A (HNF1 homeobox A), SST (somatostatin), KCND1 (potassium voltage-gated channel, Shal-related subfamily, member 1), LOC646627 (phospholipase inhibitor), TBXAS1 (thromboxane A synthase 1 (platelet)), CYP2J2 (cytochrome P450, family 2, subfamily J, polypeptide 2), TBXA2R (thromboxane A2 receptor), ADH1C (alcohol dehydrogenase 1C (class I), gamma polypeptide), ALOX12 (arachidonate 12-lipoxygenase), AHSG (alpha-2-HS-glycoprotein), BHMT (betaine-homocysteine methyltransferase), GJA4 (gap junction protein, alpha 4, 37 kDa), SLC25A4 (solute carrier family 25 (mitochondrial carrier; adenine nucleotide translocator), member 4), ACLY (ATP citrate lyase), ALOX5AP (arachidonate 5-lipoxygenase-activating protein), NUMA1 (nuclear mitotic apparatus protein 1), CYP27B1 (cytochrome P450, family 27, subfamily B, polypeptide 1), CYSLTR2 (cysteinyl leukotriene receptor 2), SOD3 (superoxide dismutase 3, extracellular), LTC4S (leukotriene C4 synthase), UCN (urocortin), GHRL (ghrelin/obestatin prepropeptide), APOC2 (apolipoprotein C-II), CLEC4A (C-type lectin domain family 4, member A), KBTBD10 (kelch repeat and BTB (POZ) domain containing 10), TNC (tenascin C), TYMS (thymidylate synthetase), SHC1 (SHC (Src homology 2 domain containing) transforming protein 1), LRP1 (low density lipoprotein receptor-related protein 1), SOCS3 (suppressor of cytokine signaling 3), ADH1B (alcohol dehydrogenase 1B (class I), beta polypeptide), KLK3 (kallikrein-related peptidase 3), HSD11B1 (hydroxysteroid (11-beta) dehydrogenase 1), VKORC1 (vitamin K epoxide reductase complex, subunit 1), SERPINB2 (serpin peptidase inhibitor, clade B (ovalbumin), member 2), TNS1 (tensin 1), RNF19A (ring finger protein 19A), EPOR (erythropoietin receptor), ITGAM (integrin, alpha M (complement component 3 receptor 3 subunit)), PITX2 (paired-like homeodomain 2), MAPK7 (mitogen-activated protein kinase 7), FCGR3A (Fc fragment of IgG, low affinity 111a, receptor (CD16a)), LEPR (leptin receptor), ENG (endoglin), GPX1 (glutathione peroxidase 1), GOT2 (glutamic-oxaloacetic transaminase 2, mitochondrial (aspartate aminotransferase 2)), HRH1 (histamine receptor H1), NR112 (nuclear receptor subfamily 1, group I, member 2), CRH (corticotropin releasing hormone), HTR1A (5-hydroxytryptamine (serotonin) receptor IA), VDAC1 (voltage-dependent anion channel 1), HPSE (heparanase), SFTPD (surfactant protein D), TAP2 (transporter 2, ATP-binding cassette, sub-family B (MDR/TAP)), RNF123 (ring finger protein 123), PTK2B (PTK2B protein tyrosine kinase 2 beta), NTRK2 (neurotrophic tyrosine kinase, receptor, type 2), IL6R (interleukin 6 receptor), ACHE (acetylcholinesterase (Yt blood group)), GLP1R (glucagon-like peptide 1 receptor), GHR (growth hormone receptor), GSR (glutathione reductase), NQO1 (NAD(P)H dehydrogenase, quinone 1), NR5A1 (nuclear receptor subfamily 5, group A, member 1), GJB2 (gap junction protein, beta 2, 26 kDa), SLC9A1 (solute carrier family 9 (sodium/hydrogen exchanger), member 1), MAOA (monoamine oxidase A), PCSK9 (proprotein convertase subtilisin/kexin type 9), FCGR2A (Fc fragment of IgG, low affinity IIa, receptor (CD32)), SERPINF1 (serpin peptidase inhibitor, clade F (alpha-2 antiplasmin, pigment epithelium derived factor), member 1), EDN3 (endothelin 3), DHFR (dihydrofolate reductase), GAS6 (growth arrest-specific 6), SMPD1 (sphingomyelin phosphodiesterase 1, acid lysosomal), UCP2 (uncoupling protein 2 (mitochondrial, proton carrier)), TFAP2A (transcription factor AP-2 alpha (activating enhancer binding protein 2 alpha)), C4BPA (complement component 4 binding protein, alpha), SERPINF2 (serpin peptidase inhibitor, clade F (alpha-2 antiplasmin, pigment epithelium derived factor), member 2), TYMP (thymidine phosphorylase), ALPP (alkaline phosphatase, placental (Regan isozyme)), CXCR2 (chemokine (C-X-C motif) receptor 2), SLC39A3 (solute carrier family 39 (zinc transporter), member 3), ABCG2 (ATP-binding cassette, sub-family G (WHITE), member 2), ADA (adenosine deaminase), JAK3 (Janus kinase 3), HSPA1A (heat shock 70 kDa protein 1A), FASN (fatty acid synthase), FGF1 (fibroblast growth factor 1 (acidic)), F11 (coagulation factor XI), ATP7A (ATPase, Cu++ transporting, alpha polypeptide), CR1 (complement component (3b/4b) receptor 1 (Knops blood group)), GFAP (glial fibrillary acidic protein), ROCK1 (Rho-associated, coiled-coil containing protein kinase 1), MECP2 (methyl CpG binding protein 2 (Rett syndrome)), MYLK (myosin light chain kinase), BCHE (butyrylcholinesterase), LIPE (lipase, hormone-sensitive), PRDX5 (peroxiredoxin 5), ADORA1 (adenosine A1 receptor), WRN (Werner syndrome, RecQ helicase-like), CXCR3 (chemokine (C-X-C motif) receptor 3), CD81 (CD81 molecule), SMAD7 (SMAD family member 7), LAMC2 (laminin, gamma 2), MAP3K5 (mitogen-activated protein kinase kinase kinase 5), CHGA (chromogranin A (parathyroid secretory protein 1)), IAPP (islet amyloid polypeptide), RHO (rhodopsin), ENPP1 (ectonucleotide pyrophosphatase/phosphodiesterase 1), PTHLH (parathyroid hormone-like hormone), NRG1 (neuregulin 1), VEGFC (vascular endothelial growth factor C), ENPEP (glutamyl aminopeptidase (aminopeptidase A)), CEBPB (CCAAT/enhancer binding protein (C/EBP), beta), NAGLU (N-acetylglucosaminidase, alpha-), F2RL3 (coagulation factor II (thrombin) receptor-like 3), CX3CL1 (chemokine (C-X3-C motif) ligand 1), BDKRB1 (bradykinin receptor B1), ADAMTS13 (ADAM metallopeptidase with thrombospondin type 1 motif, 13), ELANE (elastase, neutrophil expressed), ENPP2 (ectonucleotide pyrophosphatase/phosphodiesterase 2), CISH (cytokine inducible SH2-containing protein), GAST (gastrin), MYOC (myocilin, trabecular meshwork inducible glucocorticoid response), ATP1A2 (ATPase, Na+/K+ transporting, alpha 2 polypeptide), NF1 (neurofibromin 1), GJB1 (gap junction protein, beta 1, 32 kDa), MEF2A (myocyte enhancer factor 2A), VCL (vinculin), BMPR2 (bone morphogenetic protein receptor, type II (serine/threonine kinase)), TUBB (tubulin, beta), CDC42 (cell division cycle 42 (GTP binding protein, 25 kDa)), KRT18 (keratin 18), HSF1 (heat shock transcription factor 1), MYB (v-myb myeloblastosis viral oncogene homolog (avian)), PRKAA2 (protein kinase, AMP-activated, alpha 2 catalytic subunit), ROCK2 (Rho-associated, coiled-coil containing protein kinase 2), TFPI (tissue factor pathway inhibitor (lipoprotein-associated coagulation inhibitor)), PRKG1 (protein kinase, cGMP-dependent, type I), BMP2 (bone morphogenetic protein 2), CTNND1 (catenin (cadherin-associated protein), delta 1), CTH (cystathionase (cystathionine gamma-lyase)), CTSS (cathepsin S), VAV2 (vav 2 guanine nucleotide exchange factor), NPY2R (neuropeptide Y receptor Y2), IGFBP2 (insulin-like growth factor binding protein 2, 36 kDa), CD28 (CD28 molecule), GSTA1 (glutathione S-transferase alpha 1), PPIA (peptidylprolyl isomerase A (cyclophilin A)), APOH (apolipoprotein H (beta-2-glycoprotein 1)), S100A8 (S100 calcium binding protein A8), IL11 (interleukin 11), ALOX15 (arachidonate 15-lipoxygenase), FBLN1 (fibulin 1), NR1H3 (nuclear receptor subfamily 1, group H, member 3), SCD (stearoyl-CoA desaturase (delta-9-desaturase)), GIP (gastric inhibitory polypeptide), CHGB (chromogranin B (secretogranin 1)), PRKCB (protein kinase C, beta), SRD5A1 (steroid-5-alpha-reductase, alpha polypeptide 1 (3-oxo-5 alpha-steroid delta 4-dehydrogenase alpha 1)), HSD11B2 (hydroxysteroid (11-beta) dehydrogenase 2), CALCRL (calcitonin receptor-like), GALNT2 (UDP-N-acetyl-alpha-D-galactosamine.polypeptide N-acetylgalactosaminyltransferase 2 (GalNAc-T2)), ANGPTL4 (angiopoietin-like 4), KCNN4 (potassium intermediate/small conductance calcium-activated channel, subfamily N, member 4), PIK3C2A (phosphoinositide-3-kinase, class 2, alpha polypeptide), HBEGF (heparin-binding EGF-like growth factor), CYP7A1 (cytochrome P450, family 7, subfamily A, polypeptide 1), HLA-DRB5 (major histocompatibility complex, class II, DR beta 5), BNIP3 (BCL2/adenovirus E1B 19 kDa interacting protein 3), GCKR (glucokinase (hexokinase 4) regulator), S100A12 (S100 calcium binding protein A12), PADI4 (peptidyl arginine deiminase, type IV), HSPA14 (heat shock 70 kDa protein 14), CXCR1 (chemokine (C-X-C motif) receptor 1), H19 (H19, imprinted maternally expressed transcript (non-protein coding)), KRTAP19-3 (keratin associated protein 19-3), IDDM2 (insulin-dependent diabetes mellitus 2), RAC2 (ras-related C3 botulinum toxin substrate 2 (rho family, small GTP binding protein Rac2)), RYR1 (ryanodine receptor 1 (skeletal)), CLOCK (clock homolog (mouse)), NGFR (nerve growth factor receptor (TNFR superfamily, member 16)), DBH (dopamine beta-hydroxylase (dopamine beta-monooxygenase)), CHRNA4 (cholinergic receptor, nicotinic, alpha 4), CACNA1C (calcium channel, voltage-dependent, L type, alpha 1C subunit), PRKAG2 (protein kinase, AMP-activated, gamma 2 non-catalytic subunit), CHAT (choline acetyltransferase), PTGDS (prostaglandin D2 synthase 21 kDa (brain)), NR1H2 (nuclear receptor subfamily 1, group H, member 2), TEK (TEK tyrosine kinase, endothelial), VEGFB (vascular endothelial growth factor B), MEF2C (myocyte enhancer factor 2C), MAPKAPK2 (mitogen-activated protein kinase-activated protein kinase 2), TNFRSF11A (tumor necrosis factor receptor superfamily, member 11a, NFKB activator), HSPA9 (heat shock 70 kDa protein 9 (mortalin)), CYSLTR1 (cysteinyl leukotriene receptor 1), MAT1A (methionine adenosyltransferase I, alpha), OPRL1 (opiate receptor-like 1), IMPA1 (inositol(myo)-1(or 4)-monophosphatase 1), CLCN2 (chloride channel 2), DLD (dihydrolipoamide dehydrogenase), PSMA6 (proteasome (prosome, macropain) subunit, alpha type, 6), PSMB8 (proteasome (prosome, macropain) subunit, beta type, 8 (large multifunctional peptidase 7)), CHI3L1 (chitinase 3-like 1 (cartilage glycoprotein-39)), ALDH1B1 (aldehyde dehydrogenase 1 family, member B1), PARP2 (poly (ADP-ribose) polymerase 2), STAR (steroidogenic acute regulatory protein), LBP (lipopolysaccharide binding protein), ABCC6 (ATP-binding cassette, sub-family C(CFTR/MRP), member 6), RGS2 (regulator of G-protein signaling 2, 24 kDa), EFNB2 (ephrin-B2), GJB6 (gap junction protein, beta 6, 30 kDa), APOA2 (apolipoprotein A-II), AMPD1 (adenosine monophosphate deaminase 1), DYSF (dysferlin, limb girdle muscular dystrophy 2B (autosomal recessive)), FDFT1 (farnesyl-diphosphate farnesyltransferase 1), EDN2 (endothelin 2), CCR6 (chemokine (C-C motif) receptor 6), GJB3 (gap junction protein, beta 3, 31 kDa), IL1RL1 (interleukin 1 receptor-like 1), ENTPD1 (ectonucleoside triphosphate diphosphohydrolase 1), BBS4 (Bardet-Biedl syndrome 4), CELSR2 (cadherin, EGF LAG seven-pass G-type receptor 2 (flamingo homolog, Drosophila)), F11R (F11 receptor), RAPGEF3 (Rap guanine nucleotide exchange factor (GEF) 3), HYAL1 (hyaluronoglucosaminidase 1), ZNF259 (zinc finger protein 259), ATOX1 (ATX1 antioxidant protein 1 homolog (yeast)), ATF6 (activating transcription factor 6), KHK (ketohexokinase (fructokinase)), SAT1 (spermidine/spermine N1-acetyltransferase 1), GGH (gamma-glutamyl hydrolase (conjugase, folylpolygammaglutamyl hydrolase)), TIMP4 (TIMP metallopeptidase inhibitor 4), SLC4A4 (solute carrier family 4, sodium bicarbonate cotransporter, member 4), PDE2A (phosphodiesterase 2A, cGMP-stimulated), PDE3B (phosphodiesterase 3B, cGMP-inhibited), FADS1 (fatty acid desaturase 1), FADS2 (fatty acid desaturase 2), TMSB4X (thymosin beta 4, X-linked), TXNIP (thioredoxin interacting protein), LIMS1 (LIM and senescent cell antigen-like domains 1), RHOB (ras homolog gene family, member B), LY96 (lymphocyte antigen 96), FOXO1 (forkhead box 01), PNPLA2 (patatin-like phospholipase domain containing 2), TRH (thyrotropin-releasing hormone), GJC1 (gap junction protein, gamma 1, 45 kDa), SLC17A5 (solute carrier family 17 (anion/sugar transporter), member 5), FTO (fat mass and obesity associated), GJD2 (gap junction protein, delta 2, 36 kDa), PSRC1 (proline/serine-rich coiled-coil 1), CASP12 (caspase 12 (gene/pseudogene)), GPBAR1 (G protein-coupled bile acid receptor 1), PXK (PX domain containing serine/threonine kinase), IL33 (interleukin 33), TRIB1 (tribbles homolog 1 (Drosophila)), PBX4 (pre-B-cell leukemia homeobox 4), NUPR1 (nuclear protein, transcriptional regulator, 1), 15-Sep(15 kDa selenoprotein), CILP2 (cartilage intermediate layer protein 2), TERC (telomerase RNA component), GGT2 (gamma-glutamyltransferase 2), MT-CO1 (mitochondrially encoded cytochrome c oxidase I), and UOX (urate oxidase, pseudogene). In an additional embodiment, the chromosomal sequence may further be selected from Pon1 (paraoxonase 1), LDLR (LDL receptor), ApoE (Apolipoprotein E), Apo B-100 (Apolipoprotein B-100), ApoA (Apolipoprotein(a)), ApoA1 (Apolipoprotein A1), CBS (Cystathione B-synthase), Glycoprotein IIb/IIb, MTHRF (5,10-methylenetetrahydrofolate reductase (NADPH), and combinations thereof. In one iteration, the chromosomal sequences and proteins encoded by chromosomal sequences involved in cardiovascular disease may be chosen from CacnalC, Sod1, Pten, Ppar(alpha), Apo E, Leptin, and combinations thereof. The text herein accordingly provides exemplary targets as to CRISPR or CRISPR-Cas systems or complexes.

### Immune Orthogonal Orthologs

[1601] In some embodiments, when CRISPR enzymes need to be expressed or administered in a subject, immunogenicity of CRISPR enzymes may be reduced by sequentially expressing or administering immune orthogonal orthologs of CRISPR enzymes to the subject. As used herein, the term “immune orthogonal orthologs” refer to orthologous proteins that have similar or substantially the same function or activity, but have no or low cross-reactivity with the immune response generated by one another. Sequential expression or administration of such orthologs may not elicit robust or any secondary immune response. The immune orthogonal orthologs can avoid neutralization by existing antibodies. Cells expressing the orthologs can avoid clearance by the host's immune system (e.g., by activated CTLs). In some examples, CRISPR enzyme orthologs from different species may be immune orthogonal orthologs.

[1602] Immune orthogonal orthologs may be identified by analyzing the sequences, structures, and immunogenicity of a set of candidates orthologs. In an example method, a set of immune orthogonal orthologs may be identified by a) comparing the sequences of a set of candidate orthologs (e.g., orthologs from different species) to identify a subset of candidates that have low or no sequence similarity; b) assessing immune overlap among the members of the subset of candidates to identify candidates that have no or low immune overlap. In some cases, immune overlap among candidates may be assessed by determining the binding (e.g., affinity) between a candidate ortholog and MIIC (e.g., MIIC type I and/or MIIC II). Alternatively or additionally, immune overlap among candidates may be assessed by determining B-cell epitopes for the candidate orthologs. In one example, Immune orthogonal orthologs may be identified using method described in Moreno A M et al., BioRxiv, published online Jan. 10, 2018, doi: doi.org/10.1101/245985.

[1603] The present application also provides aspects and embodiments as set forth in the following numbered Statements:

1. A non-naturally occurring or engineered system comprising: i) a Cas12b effector protein from Table 1 or 2, ii) a guide comprising a guide sequence capable of hybridizing to a target sequence.
2. The system of statement 1, wherein the Cas12b effector protein originates from a bacterium selected from the group consisting of: Alicyclobacillus kakegawensis, Bacillus sp. V3-13, Bacillus hisashii, Lentisphaeria bacterium, and Laceyella sediminis.
3. The system of statement 1 or 2, wherein the tracr RNA is fused to the crRNA at the 5′ end of the direct repeat sequence.
4. The system of any one of the preceding statements, which comprises two or more guide sequences capable of hybridizing two different target sequences or different regions of the same target sequence.
5. The system of any one of the preceding statements, wherein the guide sequence hybridizes to one or more target sequences in a prokaryotic cell.
6. The system of any one of the preceding statements, wherein the guide sequence hybridizes to one or more target sequences in a eukaryotic cell.
7. The system of any one of the preceding statements, wherein the Cas12b effector protein comprises one or more nuclear localization signals (NLSs).
8. The system of any one of the preceding statements, wherein the Cas12b effector protein is catalytically inactive.
9. The system of any one of the preceding statements, wherein the Cas12b effector protein is associated with one or more functional domains.
10. The system of statement 9, wherein the one or more functional domains cleaves the one or more target sequences.
11. The system of statement 10, wherein the functional domain modifies transcription or translation of the one or more target sequences.
12. The system of any one of the preceding statements, wherein the Cas12b effector protein is associated with one or more functional domains; and the Cas12b effector protein contains one or more mutations within a RuvC and/or Nuc domain, whereby the formed CRISPR complex is capable of delivering an epigenetic modifier or a transcriptional or translational activation or repression signal at or adjacent to a target sequence.
13. The system of any one of the preceding statements, wherein the Cas12b effector protein is associated with an adenosine deaminase or cytidine deaminase.
14. The system of any one of the preceding statements further comprising a recombination template
15. The system of claim 14, wherein the recombination template is inserted by homology-directed repair (HDR).
16. A Cas12b vector system, which comprises one or more vectors comprising: a first regulatory element operably linked to a nucleotide sequence encoding a Cas12b effector protein from Table 1 or 2, and i) a) a second regulatory element operably linked to a nucleotide sequence encoding the guide sequence, and b) a third regulatory element operably linked to a nucleotide sequence encoding the tracr RNA, or ii) a second regulatory element operably linked to a nucleotide sequence encoding the guide sequence and the tracr RNA.
17. The vector system of statement 16, wherein the nucleotide sequence encoding the Cas12b effector protein is codon optimized for expression in a eukaryotic cell.
18. The vector system of statement 16 or 17, which is comprised in a single vector.
19. The vector system of any of statements 17 to 18, wherein the one or more vectors comprise viral vectors.
20. The vector system of any of statements 17 to 19, wherein the one or more vectors comprise one or more retroviral, lentiviral, adenoviral, adeno-associated or herpes simplex viral vectors.
21. A delivery system configured to deliver a Cas12b effector protein and one or more nucleic acid components of a non-naturally occurring or engineered composition comprising: i) Cas12b effector protein selected from Table 1 or 2, ii) a guide sequence that is capable of hybridizing to one or more target sequences, and iii) a tracr RNA.
22. The delivery system of statement 21, which comprises one or more vectors, or one or more polynucleotide molecules, the one or more vectors or polynucleotide molecules comprising one or more polynucleotide molecules encoding the Cas12b effector protein and one or more nucleic acid components of the non-naturally occurring or engineered composition.
23. The delivery system of statement 21 or 22, which comprises a delivery vehicle comprising liposome(s), particle(s), exosome(s), microvesicle(s), a gene-gun, or viral vector(s).
24. The non-naturally occurring or engineered system of any one of statements 1 to 15, vector system of any one of statements 16 to 20, or delivery system of any one of statements 21 to 23, for use in a therapeutic method of treatment.
25. A method of modifying one or more target sequences of interest, the method comprising contacting one or more target sequences with one or more non-naturally occurring or engineered compositions comprising: i) a Cas12b effector protein from Table 1 or 2, ii) a guide sequence that is capable of hybridizing to one or more target sequences, and iii) a tracr RNA, whereby there is formed a CRISPR complex comprising the Cas12b effector protein complexed with the crRNA and the tracr RNA, wherein the guide sequence directs sequence-specific binding to the one or more target sequences sequence in a cell, whereby expression of one or more target sequences is modified.
26. The method of statement 25, wherein modifying the one or more target sequences comprises cleaving the target DNA.
27. The method of statement 25 or 26, wherein modifying the one or more target sequences comprises increasing or decreasing expression of the one or more target sequences.
28. The method of any of statements 25 to 27, wherein the composition further comprises a recombination template, and wherein modifying the one or more target sequences comprises insertion of the recombination template or a portion thereof.
29. The method of any of statements 25 to 28, wherein the target gene is in a prokaryotic cell.
30. The method of any of statements 25 to 29, wherein the one or more target sequences is in a eukaryotic cell.
31. A cell or progeny thereof comprising a modified target of interest, wherein the one or more target sequences has been modified according to the method of any of statements 25 to 30 optionally a therapeutic T cell or antibody-producing B-cell or wherein said cell is a plant cell.
32. The cell of statement 31, wherein the cell is a prokaryotic cell.
33. The cell of statement 31, wherein the cell is a eukaryotic cell.
34. The cell according to any of statements 31 to 33, wherein the modification of the one or more target sequences results in: the cell comprising altered expression of at least one gene product; the cell comprising altered expression of at least one gene product, wherein the expression of the at least one gene product is increased; or the cell comprising altered expression of at least one gene product, wherein the expression of the at least one gene product is decreased or a cell or population that produces and/or secretes an endogenous or non-endogenous biological product or chemical compound.
35. The eukaryotic cell according to statement 31 or 34, wherein the cell is a mammalian cell or a human cell.
36. A cell line of or comprising the cell according to any one of statements 31 to 35, or progeny thereof.
37. A multicellular organism comprising one or more cells according to any one of statements 31 to 35.
38. A plant or animal model comprising one or more cells according to any one of statements 31 to 35.
39. A gene product from a cell of any one of statements 31 to 35 or the cell line of statement 36 or the organism of statement 37 or the plant or animal model of statement 38.
40. The gene product of statement 39, wherein the amount of gene product expressed is greater than or less than the amount of gene product from a cell that does not have altered expression.
41. An isolated Cas12b effector protein from Table 1 or 2.
42. An isolated nucleic acid encoding the Cas12b effector protein of statement 41.
43. The isolated nucleic acid according to statement 42, which is a DNA and further comprises a sequence encoding a crRNA and a tracr RNA.
44. An isolated eukaryotic cell comprising the nucleic acid according to statement 42 or 43 or the Cas12b of statement 41.
45. A non-naturally occurring or engineered system comprising: i) an mRNA encoding a Cas12b effector protein from Table 1 or 2, ii) a guide sequence, and iii) a tracr RNA.
46. The non-naturally occurring or engineered system according to statement 45, wherein the tracr RNA is fused to the crRNA at the 5′ end of the direct repeat.
47. An engineered composition for site directed base editing comprising a targeting domain and an adenosine deaminase, cytidine deaminase, or catalytic domain thereof, wherein the targeting domain comprise a Cas12b effector protein, or fragment thereof which retains oligonucleotide-binding activity and a guide molecule.
48. The composition of statement 47, wherein the Cas12b effector protein is catalytically inactive.
49. The composition of statement 47 or 48, wherein the Cas12b effector protein is selected from Table 1 or 2.
50. The composition of any one of statements 47-49, protein wherein the Cas12b effector protein originates from a bacterium selected from the group consisting of: Alicyclobacillus kakegawensis, Bacillus sp. V3-13, Bacillus hisashii, Lentisphaeria bacterium, and Laceyella sediminis.
51. A method of modifying an adenosine or cytidine in one or more target oligonucleotides of interest, comprising delivering to said one or more target oligonucleotides, the composition according to any one of statements 47 to 50.
52. The method of statement 51, wherein the for use in the treatment or prevention of a disease caused by transcripts containing a pathogenic T-C or A-G point mutation.
53. An isolated cell obtained from the method of any one of statement 51 or 52 and/or comprising the composition of any one of statements 47-50.
54. The cell or progeny thereof of statement 53, wherein said eukaryotic cell, preferably a human or non-human animal cell, optionally a therapeutic T cell or antibody-producing B-cell or wherein said cell is a plant cell.
55. A non-human animal comprising said modified cell or progeny thereof of statements 53 or 54.
56. A plant comprising said modified cell of statement 54.
57. A modified cell according to statement 53 or 54 for use in therapy, preferably cell therapy.
58. A method of modifying an adenine or cytosine in a target oligonucleotide, comprising delivering to said target oligonucleotide: a catalytically inactive Cas12b protein; a guide molecule which comprises a guide sequence linked to a direct repeat; and an adenosine or cytidine deaminase protein or catalytic domain thereof; wherein said adenosine or cytidine deaminase protein or catalytic domain thereof is covalently or non-covalently linked to said catalytically inactive Cas12b protein or said guide molecule or is adapted to linked thereto after delivery; wherein said guide molecule forms a complex with said catalytically inactive Cas12b and directs said complex to bind said target oligonucleotide, wherein said guide sequence is capable of hybridizing with a target sequence within said target oligonucleotide to form an oligonucleotide duplex.
59. The method of statement 58, wherein: (A) said Cytosine is outside said target sequence that forms said oligonucleotide duplex, wherein said cytidine deaminase protein or catalytic domain thereof deaminates said Cytosine outside said oligonucleotide duplex, or (B) said Cytosine is within said target sequence that forms said oligonucleotide duplex, wherein said guide sequence comprises a non-pairing Adenine or Uracil at a position corresponding to said Cytosine resulting in a C-A or C-U mismatch in said RNA duplex, and wherein the cytidine deaminase protein or catalytic domain thereof deaminates the Cytosine in the oligonucleotide duplex opposite to the non-pairing Adenine or Uracil.
60. The method of statement 58 or 59, said adenosine deaminase protein or catalytic domain thereof deaminates said Adenine or Cytosine in said oligonucleotide duplex.
61. The method of any one of statements 58-60, wherein the Cas12b protein is selected from Table 1 or 2.
62. The method of statement 61, wherein the Cas12b protein originates from a bacterium selected from the group consisting of: Alicyclobacillus kakegawensis, Bacillus sp. V3-13, Bacillus hisashii, Lentisphaeria bacterium, and Laceyella sediminis.
63. A system for detecting the presence of nucleic acid oligonucleotide target sequences in one or more in vitro samples, comprising: a Cas12b protein; at least one guide polynucleotide comprising a guide sequence designed to have a degree of complementarity with the one or more target sequences, and designed to form a complex with the Cas12b protein; and an oligonucleotide-based masking construct comprising a non-target sequence; wherein the Cas12b protein exhibits collateral nuclease activity and cleaves the non-target sequence of the oligo-nucleotide based masking construct once activated by the one or more target sequences.
64. A system for detecting the presence of target polypeptides in one or more in vitro samples comprising: a Cas12b protein; one or more detection aptamers, each designed to bind to one of the one or more target polypeptides, each detection aptamer comprising a masked promoter binding site or masked primer binding site and a trigger sequence template; and an oligonucleotide-based masking construct comprising a non-target sequence.
65. The system of statement 64 or 65, further comprising nucleic acid amplification reagents to amplify the target sequence or the trigger sequence.
66. The system of statement 652, wherein the nucleic acid amplification reagents are isothermal amplification reagents.
67. The system of any one of statements 63 to 66, wherein the Cas12b protein is selected from Table 1 or 2.
68. The system of statement 67, wherein the Cas12b protein originates from a bacterium selected from the group consisting of: Alicyclobacillus kakegawensis, Bacillus sp. V3-13, Bacillus hisashii, Lentisphaeria bacterium, and Laceyella sediminis.
69. A method for detecting one or more sequences in one or more in vitro samples, comprising: contacting one or more samples with: i) a Cas12b effector protein, ii) at least one guide polynucleotide comprising a guide sequence designed to have a degree of complementarity with the one or more target sequences, and designed to form a complex with the Cas12b effector protein; and iii) an oligonucleotide-based masking construct comprising a non-target sequence; and wherein said Cas12 effector protein exhibits collateral nuclease activity and cleaves the non-target sequence of the oligo-nucleotide-based masking construct.
70. The method of statement 69, wherein the Cas12b effector protein is selected from Table 1 or 2.
71. The method of statement 70, wherein the Cas12b effector protein originates from a bacterium selected from the group consisting of: Alicyclobacillus kakegawensis, Bacillus sp. V3-13, Bacillus hisashii, Lentisphaeria bacterium, and Laceyella sediminis.
72. A non-naturally occurring or engineered composition comprising a Cas12b protein linked to an inactive first portion of an enzyme or reporter moiety, wherein the enzyme or reporter moiety is reconstituted when contacted with a complementary portion of the enzyme or reporter moiety.
73. The composition of statement 72, wherein the enzyme or reporter moiety comprises a proteolytic enzyme.
74. The composition of statement 72 or 73, wherein the Cas12 protein comprises a first Cas12b protein and a second Cas12b protein linked to the complementary portion of the enzyme or reporter moiety.
75. The composition of any one of statements 72-74, further comprising: i) a first guide capable of forming a complex with the first Cas12b protein and hybridizing to a first target sequence of a target nucleic acid; and ii) a second guide capable of forming a complex with the second Cas12b protein, and hybridizing to a second target sequence of the target nucleic acid.
76. The composition of any one of statements 72-75, wherein the enzyme comprises a caspase.
77. The composition of any one of statements 72-75, wherein the enzyme comprises tobacco etch virus (TEV).
78. A method of providing a proteolytic activity in a cell containing a target oligonucleotide, comprising: a) contacting a cell or population of cells with: i) a first Cas12b effector protein linked to an inactive portion of a proteolytic enzyme; ii) a second Cas12b effector protein linked to a complementary portion the proteolytic enzyme, wherein proteolytic activity of the proteolytic enzyme is reconstituted when the first portion and the complementary portion of the proteolytic enzyme are contacted; iii) a first guide that binds to the first Cas12b effector protein and hybridizes to a first target sequence of the target oligonucleotide; and iv) a second guide that binds to the second Cas12b effector protein and hybridizes to a second target sequence of the target oligonucleotide, whereby the first portion and a complementary portion of the proteolytic enzyme are contacted and the proteolytic activity of the proteolytic enzyme is reconstituted.
79. The method of statement 78, wherein the proteolytic enzyme is a caspase.
80. The method of statement 79, wherein the proteolytic enzyme is TEV protease, wherein the proteolytic activity of the TEV protease is reconstituted, whereby a TEV substrate is cleaved and activated.
81. The method of statement 80, wherein the TEV substrate is a procaspase engineered to contain TEV target sequences whereby cleavage by the TEV protease activates the procaspase.
82. A method of identifying a cell containing an oligonucleotide of interest, the method comprising contacting the oligonucleotide in the cell with a composition which comprises: i) a first Cas12b effector protein linked to an inactive first portion of a proteolytic enzyme; ii) a second Cas12b effector protein linked to a complementary portion of the proteolytic enzyme wherein activity of the proteolytic enzyme is reconstituted when the first portion and the complementary portion of the proteolytic enzyme are contacted; iii) a first guide that binds to the first Cas12b effector protein and hybridizes to a first target sequence of the oligonucleotide; iv) a second guide that binds to the second Cas12b effector protein and hybridizes to a second target sequence of the oligonucleotide; and v) a reporter which is detectably cleaved, wherein the first portion and a complementary portion of the proteolytic enzyme are contacted when the oligonucleotide of interest is present in the cell, whereby the activity of the proteolytic enzyme is reconstituted and detectably cleaves the reporter.
83. A method of identifying a cell containing an oligonucleotide of interest, the method comprising contacting the oligonucleotide in the cell with a composition which comprises: i) a first Cas12b effector protein linked to an inactive first portion of a reporter; ii) a second Cas12b effector protein linked to a complementary portion of the reporter wherein activity of the reporter is reconstituted when the first portion and the complementary portion of the reporter are contacted; iii) a first guide that binds to the first Cas12b effector protein and hybridizes to a first target sequence of the oligonucleotide; iv) a second guide that binds to the second Cas12b effector protein and hybridizes to a second target sequence of the oligonucleotide; and v) the reporter, wherein the first portion and a complementary portion of the reporter are contacted when the oligonucleotide of interest is present in the cell, whereby the activity of the reporter is reconstituted.
84. The method of statement 82 or 83, wherein the reporter is a fluorescent protein or a luminescent protein.

[1604] The invention is further described in the following examples, which do not limit the scope of the invention described in the claims.

### EXAMPLES

### Example 1

[1605] Table 11 shows amino acid sequences of example C2c1 orthologs.

TABLE 11
C2c1 orthologs

| Host | Amino Acid Sequence |
|---|---|
| Alicyclobacillus | MVAVKSIKVKLMLGHLPEIREGLWHLHEAVNLGVRYYTEWLAL |
| macrosporangiidus | LRQGNLYRRGKDGAQECYMTAEQCRQELLVRLRDRQKRNGHT |
| strain DSM | GDPGTDEELLGVARRLYELLVPQSVGKKGQAQMLASGFLSPLAD |
| 17980 | PKSEGGKGTSKSGRKPAWMGMKEAGDSRWVEAKARYEANKAK |
| (SEQ ID NO: 484) | DPTKQVIASLEMYGLRPLFDVFTETYKTIRWMPLGKHQGVRAWD |
| | RDMFQQSLERLMSWESWNERVGAEFARLVDRRDRFREKHFTGQ |
| | EHLVALAQRLEQEMKEASPGFESKSSQAHRITKRALRGADGIIDD |
| | WLKLSEGEPVDRFDEILRKRQAQNPRRFGSHDLFLKLAEPVFQPL |
| | WREDPSFLSRWASYNEVLNKLEDAKQFATFTLPSPCSNPVWARF |
| | ENAEGTNIFKYDFLFDHFGKGRHGVRFQRMIVMRDGVPTEVEGI |
| | VVPIAPSRQLDALAPNDAASPIDVFVGDPAAPGAFRGQFGGAKIQ |
| | YRRSALVRKGRREEKAYLCGFRLPSQRRTGTPADDAGEVFLNLS |
| | LRVESQSEQAGRRNPPYAAVFHISDQTRRVIVRYGEIERYLAEHP |
| | DTGIPGSRGLTSGLRVMSVDLGLRTSAAISVFRVAHRDELTPDAH |
| | GRQPFFFPIHGMDHLVALHERSHLIRLPGETESKKVRSIREQRLDR |
| | LNRLRSQMASLRLLVRTGVLDEQKRDRNWERLQSSMERGGERM |
| | PSDWWDLFQAQVRYLAQHRDASGEAWGRMVQAAVRTLWRQL |
| | AKQVRDWRKEVRRNADKVKIRGIARDVPGGHSLAQLDYLERQY |
| | RFLRSWSAFSVQAGQVVRAERDSRFAVALREHIDNGKKDRLKKL |
| | ADRILMEALGYVYVTDGRRAGQWQAVYPPCQLVLLEELSEYRFS |
| | NDRPPSENSQLMVWSHRGVLEELIHQAQVHDVLVGTIPAAFSSRF |
| | DARTGAPGIRCRRVPSIPLKDAPSIPIWLSHYLKQTERDAAALRPG |
| | ELIPTGDGEFLVTPAGRGASGVRVVHADINAAHNLQRRLWENFD |
| | LSDIRVRCDRREGKDGTVVLIPRLTNQRVKERYSGVIFTSEDGVSF |
| | TVGDAKTRRRSSASQGEGDDLSDEEQELLAEADDARERSVVLFR |
| | DPSGFVNGGRWTAQRAFWGMVHNRIETLLAERFSVSGAAEKVR |
| | G |
| Bacillus hisashii | MATRSFILKIEPNEEVKKGLWKTHEVLNHGIAYYMNILKLIRQEAI |
| strain C4 | YEHHEQDPKNPKKVSKAEIQAELWDFVLKMQKCNSFTHEVDKD |
| (SEQ ID NO: 485) | EVFNILRELYEELVPSSVEKKGEANQLSNKFLYPLVDPNSQSGKG |
| | TASSGRKPRWYNLKIAGDPSWEEEKKKWEEDKKKDPLAKILGKL |
| | AEYGLIPLFIPYTDSNEPIVKEIKWMEKSRNQSVRRLDKDMFIQAL |
| | ERFLSWESWNLKVKEEYEKVEKEYKTLEERIKEDIQALKALEQY |
| | EKERQEQLLRDTLNTNEYRLSKRGLRGWREIIQKWLKMDENEPS |
| | EKYLEVFKDYQRKHPREAGDYSVYEFLSKKENHFIWRNHPEYPY |
| | LYATFCEIDKKKKDAKQQATFTLADPINHPLWVRFEERSGSNLNK |
| | YRILTEQLHTEKLKKKLTVQLDRLIYPTESGGWEEKGKVDIVLLP |
| | SRQFYNQIFLDIEEKGKHAFTYKDESIKFPLKGTLGGARVQFDRD |
| | HLRRYPHKVESGNVGRIYFNMTVNIEPTESPVSKSLKIHRDDFPK |
| | VVNFKPKELTEWIKDSKGKKLKSGIESLEIGLRVMSIDLGQRQAA |
| | AASIFEVVDQKPDIEGKLFFPIKGTELYAVHRASFNIKLPGETLVK |
| | SREVLRKAREDNLKLMNQKLNFLRNVLHFQQFEDITEREKRVTK |
| | WISRQENSDVPLVYQDELIQIRELMYKPYKDWVAFLKQLHKRLE |
| | VEIGKEVKHWRKSLSDGRKGLYGISLKNIDEIDRTRKFLLRWSLR |
| | PTEPGEVRRLEPGQRFAIDQLNHLNALKEDRLKKMANTIIMHALG |
| | YCYDVRKKKWQAKNPACQIILFEDLSNYNPYEERSRFENSKLMK |
| | WSRREIPRQVALQGEIYGLQVGEVGAQFSSRFHAKTGSPGIRCSV |
| | VTKEKLQDNRFFKNLQREGRLTLDKIAVLKEGDLYPDKGGEKFIS |
| | LSKDRKCVTTHADINAAQNLQKRFWTRTHGFYKVYCKAYQVDG |
| | QTVYIPESKDQKQKIIEEFGEGYFILKDGVYEWVNAGKLKIKKGS |
| | SKQSSSELVDSDILKDSFDLASELKGEKLMLYRDPSGNVFPSDKW |
| | MAAGVFFGKLERILISKLTNQYSISTIEDDSSKQSM |
| Candidatus | MPRDDLDLLTNLNSTAKGIRERGKTKEGTDKKKSGRKSSWPMD |
| Lindowbacteria | KAAWETAKTSDSSAHFLEKLKQHPDLKDAFGNLSSGGSKKLEYY |
| bacterium | KKLAGSAPWKESQSVILEKAARWKEAKQEREEKEQDSSEHGSKA |
| RIFCSPLOWO2 | AYRRLFDAGCLPMPEFAKYIDENQIEFGDLKLSDCGAEWKRGM |
| (SEQ ID NO: 486) | WNQAGQRVRSHMGWQRRREKENAVYSLRKELFEKGGAIRRKKS |
| | EELTPEDILPGKAAPDQNDWQERPAYGNQMWFIGLRSYEENEMA |
| | KYAEEAGMGSRSAPRIRRGTIKGWSKLRERWLQILKRNPQATRD |
| | DLIGELNALRSQDPRAYGDARLFDWLSKTDQRFLWDGFDADGKI |
| | LCGRDDRDCVSAFVAYNEEFADEPSSITLTETDERLHPVWPFFGE |
| | SSAVPYEIEYDLETACPTAIRLPLLVGKENGGYAERQGTRLPLAE |
| | YADLASSFQLPTPVRLDVLVEIREVTRAGRKVTCPFSYFKQNGV |
| | WYVREGEIPSGESIQIKQTDRKIENGKIFISSKLRMAYRDDLMVSP |
| | ATGDFGSIKILWERIELASHVDQKKLPETAPARSRVFVSFSCNVVE |
| | RAPRKQLTRKPDAVVVTIPSGVDQGLVVVSTDVRTGKSKSSSAPP |
| | LPPGSRLWPADAVHGDPPLRILSVDLGHRHSAYAVWELGLQQKS |
| | WRAGVLKGSTQTPVYADCTGTGLLCLPGDGEDTPAEEESLRLRS |
| | RQIRRRLNLQNSILRVSRLLSLDKFEKTIFEQSDVRDRPNKKGLRI |
| | RRRCRTEKTPLSEAEVRKNCDKAAEILIRWADTDAMAKSLAATG |
| | NADISFWKYMAVKNPPLSAVVDVAPSTIVPDDGPDRETLKKKRQ |
| | EEEEKFASSIYENRVKLAGALCSGYDADHRRPATGGLWHDLDRT |
| | LIREISYGDRGQKGNPRKLNNEGILRLLRRPPRARPDWREFHRTL |
| | NDANRIPKGRTLRGGLSMGRLNFLKEVGDFVKKWSCRPRWPGD |
| | RRHIPPGQLFDRQDAEHLEHLRDDRIKRLAHLIVAQALGFEPDIRR |
| | GLWKYVDGSTGEILWQHPETRRFFAEGAAGELREVSRPAEIDDD |
| | AAARPHTVSAPAHIVVFENLIRYRFQSDRPKTENAGLMQWAHRQ |
| | IVHFTKQVASLYGLKVAMVYAAFSSKFCSRCGSPGARVSRFDPA |
| | WRNQEWFKRRTSNPRSKVDHSLKRASEDPTADETRPWVLIEGGK |
| | EFVCANAKCSAHDEPLNADENAAANIGLRFLRGVEDFRTKVNPA |
| | GALKGKLRFETGIHSFRPPVSGSPFWSPMAEPAQKKKIGAAAPGA |
| | DVDEAGDADESGVVVLFRDPSGAFRNKQYWYEGKIFWSNVMM |
| | AVEAKIAGASVGAKPVAASWGQAQPQSGPGLAKPGGD |
| Elusimicrobia | MNRIYQGRVTKVEVPDGKDEKGNIKWKKLENWSDILWQHRMLF |
| bacterium | QDAVNYYTLALAAISGSAVGSDEKSIILREWAVQVQNIWEKAKK |
| RIFOXYA12 | KATVFEGPQKRLTSILGLEQNASFDIAAKHILRTSEAKPEQRASAL |
| (SEQ ID NO: 487) | IRLLEEIDKKNHNVVCGERLPFFCPRNIQSKRSPTSKAVSSVQEQK |
| | RQEEVRRFHNMQPEEVVKNAVTLDISLFKSSPKIVFLEDPKKARA |
| | ELLKQFDNACKKHKELVGIKKAFTESIDKHGSSLKVPAPGSKPSG |
| | LYPSAIVFKYFPVDITKTVFLKATEKLAMGKDREVTNDPIADARV |
| | NDKPHFDYFTNIALIREKEKNRAAWFEFDLAAFIEAIMSPHRFYQ |
| | DTQKRKEAARKLEEKIKAIEGKGGQFKESDSEDDDVDSLPGFEGD |
| | TRIDLLRKLVTDTLGWLGESETPDNNEGKKTEYSISERTLRIFPDIQ |
| | KQWSELAEKGETTEGKLLEVLKHEQTEHQSDFGSATLYQHLAKP |
| | EFHPIWLKSGTEEWHAENPLKAWLNYKELQYELTDKKRPIHFTP |
| | AHPVYSPRYFDFPKKSETEEKEVSKNTHSLTTSLASEHIKNSLQFT |
| | AGLIRKTNVGKKAIKARFSYSAPRLRRDCLRSENNENLYKAPWL |
| | QPMMRALGIDEEKADRQNFANTRITLMAKGLDDIQLGFPVEANS |
| | QELQKEVSNGISWKGQFNWGGIASLSALRWPHEKKPKNPPEQPW |
| | WGIDSFSCLAVDLGQRYAGAFARLDVSTIEKKGKSRFIGEACDKK |
| | WYAKVSRMGLLRLPGEDVKVWRDASKIDKENGFAFRKELFGEK |
| | GRSATPLEAEETAELIKLFGANEKDVMPDNWSKELSFPEQNDKLL |
| | IVARRAQAAVSRLHRWAWFFDEAKRSDDAIREILESDDTDLKQK |
| | VNKNEIEKVKETIISLLKVKQELLPTLLTRLANRVLPLRGRSWEW |
| | KKHHQKNDGFILDQTGKAMPNVLIRGQRGLSMDRIEQITELRKRF |
| | QALNQSLRRQIGKKAPAKRDDSIPDCCPDLLEKLDHMKEQRVNQ |
| | TAHMILAEALGLKLAEPPKDKKELNETCDMHGAYAKVDNPVSFI |
| | VIEDLSRYRSSQGRSPRENSRLMKWCHRAVRDKLKEMCEVFFPL |
| | CERRKAGSAWVSLPPLLETPAAYSSRFCSRSGVAGFRAVEVIPGF |
| | ELKYPWSWLKDKKDKAGNLAKEALNIRTVSEQLKAFNQDKPEK |
| | PRTLLVPIAGGPIFVPISEVGLSSFGLKPQVVQADINAAINLGLRAIS |
| | DPRIWEIHPRLRTEKRDGRLFAREKRKYGEEKVEVQPSKNEKAK |
| | KVKDDRKPNYFADFSGKVDWGFGNIKNESGLTLVSGKALWWTI |
| | NQLQWERCFDINKRHIEDWSNKQKQ |
| Omnitrophica | MNRIYQGRVTKVEKLKNGKSPDDREELKDWQTALWRHHELFQD |
| WOR_2 | AVSYYTLALAAMAEGLPDKHPINVLRKRMEEAWEEFPRKTVTPA |
| bacterium | KNLRDSVRPWLGLSESASFGDALKKILPPAPENKEVRALAVALLA |
| RIFCSPHIGHO | EKARTLKPQKTSASYWGRFCDDLKKKPNWDYSEEELARKTGSG |
| 2 | DWVAGLWSEDALNKIDELAKSLKLSSLVKCVPDGQINPEGARNL |
| (SEQ ID NO: 488) | VKEALDHLEGVSNGTKKEKNDPGPAKKTNNWLRQHASDVRNFI |
| | HKNKNQFSSLPNGRLITERARGGGININKTYAGVLFKAFPCPFTFD |
| | YVRAAVPEPKVKKVDQEKKSEQSATWTELEKRILRIGDDPIELAR |
| | KNNKPIFKAFTALEKWSDQNSKSCWSDFDKCAFEEALKTLNQFN |
| | QKTEEREKRRSEAEAELKYMMDENPEWKPKKETEGDDVREVPIL |
| | KGDPRYEKLVKLFGDLDEEGSEHATGKIYGPSRASLRGFGKLRNE |
| | WVDLFTKANDNPREQDLQKAVTGFQREHKLDMGYTAFFLKLCE |
| | RDYWDIWRDDTEVEVKKIREKRWVKSVVYAAADTRELAEELER |
| | LQEPVRYTPAEPQFSRRLFMFSDIKGKQGAKHIREGLVEVSLAVK |
| | DQSGKYGTCRVRLHYSAPRLIRDHLSDGSSSMWLQPMMAALGL |
| | SSDARGCFTRDSKGNVKEPAVALMSDFVGRKRELRMLLNFPVDL |
| | DISKLEENIGKKARWEKQMNTAYEKNKLKQRFHLIWPGMELKET |
| | QEPGQFWWDNPTIQKEGMYCLAIDLSQRRAADYALLHAGVNRD |
| | SKTFVELGQAGGQSWFTKLCAAGSLRLPGEDTEVIREGKRQIELS |
| | GKKGRNATQSEYDQAIALAKQLLHNENSAELESAARDWLGDNA |
| | KRFSFPEQNDKLIDLYYGALSRYKTWLRWSWRLTEQHKELWDK |
| | TLDEIRKVPYFASWGELAGNGTNEATVQQLQKLIADAAVDLRNF |
| | LEKALLHIAYRALPLRENTWRWIENGKDGKGKPLHLLVSDGQSP |
| | AEIPWLRGQRGLSIARIEQLENFRRAVLSLNRLLRHEIGTKPEFGSS |
| | TCGESLPDPCPDLTDKIVRLKEERVNQTAHLIIAQSLGVRLKGHSL |
| | FTEEREKADMHGEHEVIPGRSPVDFVVLEDLSRYTTDKSRSRSEN |
| | SRLMKWCHRKINEKVKLLAEPFGIPVIEVFASYSSKFDARTGAPG |
| | FRAVEVTSEDRPFWRKTIEKQSVAREVFDCLDNLVGKGLNGIHL |
| | VLPQNGGPLFIAAVKEDQPLPAIRQADINAAVNIGLRAIAGPSCYH |
| | AHPKVRLIKGESGTDKGKWLPRKGKEANKRENAQFGNVDLDLE |
| | VKFNRLDIDSDVLKGDNTNLFHDPLNIACYGFATIQNLQHPFLAH |
| | ASAVFSRQKGAVARLQWEVCRAINSRRLEAWQKKAEKAAVKR |
| Phycisphaerae | MATKSYRARILTDSRLAAALDRTHVVFVESLKQMINTYLRMQNG |
| bacterium ST- | KFGPDHKKLAQIMLSRSNTFAHGVMDQITRDQPTSTLDEEWTDL |
| NAGAB-D1 | ARRIHKTTGPLFLQAERFATVKNRAIHTKSRGKVIPSPETLAVPAK |
| (SEQ ID NO: 489) | FWHQVCDSASAYIRSNRELMQQWRKDRAAWLKDKNEWQQKHP |
| | EFMQFYNGPYQNFLKLCDDDRITSQLAAEQQPTASKNNRPRKTG |
| | KRFARWHLWYKWLSENPEIIEWRNKASASDFKTVTDDVRKQIIT |
| | KYPQQNKYITRLLDWLEDNNPELKTLENLRRTYVKKFDSFKRPPT |
| | LTLPSPYRHPYWFTMELDQFYKKADFENGTIQLLLIDEDDDGNW |
| | FFNWMPASLKPDPRLVPSWRAETFETEGRFPPYLGGKIGKKLSRP |
| | APTDAERKAGIAGAKLMIKNNRSELLFTVFEQDCPPRVKWAKTK |
| | NRKCPADNAFSSDGKTRKPLRILSIDLGIRHIGAFALTQGTRNDSA |
| | WQTESLKKGIINSPSIPPLRQVRRHDYDLKRKRRRHGKPVKGQRS |
| | NANLQAHRTNMAQDRFKKGASAIVSLAREHSADLILFENLHSLK |
| | FSAFDERWMNRQLRDMNRRHIVELVSEQAPEFGITVKDDINPWM |
| | TSRICSNCNLPGFRFSMKKKNPYREKLPREKCTDFGYPVWEPGGH |
| | LFRCPHCDHRVNADINAAANLANKFFGLGYWNNGLKYDAETKT |
| | FTVHTDKKTPPLIFKPRPQFDLWADSVKTRKQLGPDPF |
| Planctomycetes | MSVRSFQARVECDKQTMEHLWRTHKVFNERLPEIIKILFKMKRG |
| bacterium | ECGQNDKQKSLYKSISQSILEANAQNADYLLNSVSIKGWKPGTA |
| RBG_13_46_10 | KKYRNASFTWADDAAKLSSQGIHVYDKKQVLGDLPGMMSQMV |
| (SEQ ID NO: 490) | CRQSVEAISGHIELTKKWEKEHNEWLKEKEKWESEDEHKKYLDL |
| | REKFEQFEQSIGGKITKRRGRWHLYLKWLSDNPDFAAWRGNKA |
| | VINPLSEKAQIRINKAKPNKKNSVERDEFFKANPEMKALDNLHGY |
| | YERNFVRRRKTKKNPDGFDHKPTFTLPHPTIHPRWFVFNKPKTNP |
| | EGYRKLILPKKAGDLGSLEMRLLTGEKNKGNYPDDWISVKFKAD |
| | PRLSLIRPVKGRRVVRKGKEQGQTKETDSYEFFDKHLKKWRPAK |
| | LSGVKLIFPDKTPKAAYLYFTCDIPDEPLTETAKKIQWLETGDVTK |
| | KGKKRKKKVLPHGLVSCAVDLSMRRGTTGFATLCRYENGKIHIL |
| | RSRNLWVGYKEGKGCHPYRWTEGPDLGHIAKHKREIRILRSKRG |
| | KPVKGEESHIDLQKHIDYMGEDRFKKAARTIVNFALNTENAASK |
| | NGFYPRADVLLLENLEGLIPDAEKERGINRALAGWNRRHLVERVI |
| | EMAKDAGFKRRVFEIPPYGTSQVCSKCGALGRRYSIIRENNRREIR |
| | FGYVEKLFACPNCGYCANADHNASVNLNRRFLIEDSFKSYYDWK |
| | RLSEKKQKEEIETIESKLMDKLCAMHKISRGSISK |
| Spirochaetes | MSFTISYPFKLIIKNKDEAKALLDTHQYMNEGVKYYLEKLLMFR |
| bacterium | QEKIFIGEDETGKRIYIEETEYKKQIEEFYLIKKTELGRNLTLTLDEF |
| GWB1_27_13 | KTLMRELYICLVSSSMENKKGFPNAQQASLNIFSPLFDAESKGYIL |
| (SEQ ID NO: 491) | KEENNNISLIHKDYGKILLKRLRDNNLIPIFTKFTDIKKITAKLSPTA |
| | LDRMIFAQAIEKLLSYESWCKLMIKERFDKEVKIKELENKCENKQ |
| | ERDKIFEILEKYEEERQKTFEQDSGFAKKGKFYITGRMLKGFDEIK |
| | EKWLKEKDRSEQNLINILNKYQTDNSKLVGDRNLFEFIIKLENQC |
| | LWNGDIDYLKIKRDINKNQIWLDRPEMPRFTMPDFKKHPLWYRY |
| | EDPSNSNFRNYKIEVVKDENYITIPLITERNNEYFEENYTFNLAKL |
| | KKLSENITFIPKSKNKEFEFIDSNDEEEDKKDQKKSKQYIKYCDTA |
| | KNTSYGKSGGIRLYFNRNELENYKDGKKMDSYTVFTLSIRDYKS |
| | LFAKEKLQPQIFNTVDNKITSLKIQKKFGNEEQTNFLSYFTQNQIT |
| | KKDWMDEKTFQNVKELNEGIRVLSVDLGQRFFAAVSCFEIMSEI |
| | DNNKLFFNLNDQNHKIIRINDKNYYAKHIYSKTIKLSGEDDDLYK |
| | ERKINKNYKLSYQERKNKIGIFTRQINKLNQLLKIIRNDEIDKEKFK |
| | ELIETTKRYVKNTYNDGIIDWNNVDNKILSYENKEDVINLHKELD |
| | KKLEIDFKEFIRECRKPIFRSGGLSMQRIDFLEKLNKLKRKWVART |
| | QKSAESIVLTPKFGYKLKEHINELKDNRVKQGVNYILMTALGYIK |
| | DNEIKNDSKKKQKEDWVKKNRACQIILMEKLTEYTFAEDRPREE |
| | NSKLRMWSHRQIFNFLQQKASLWGILVGDVFAPYTSKCLSDNNA |
| | PGIRCHQVTKKDLIDNSWFLKIVVKDDAFCDLIEINKENVKNKSIK |
| | INDILPLRGGELFASIKDGKLHIVQADINASRNIAKRFLSQINPFRV |
| | VLKKDKDETFHLKNEPNYLKNYYSILNFVPTNEELTFFKVEENKD |
| | IKPTKRIKMDKHEKESTDEGDDYSKNQIALFRDDSGIFFDKSLWV |
| | DGKIFWSVVKNKMTKLLRERNNKKNGSK |
| Verrucomicrobiaceae | MPLSRIYQGRTNSLIILTPTPQEPWDHKALARFDSPLWRHHALFQ |
| bacterium | DAVNYYQLCLVALASSDGTRPLSKLHEQMKASWDEAKTDTEDS |
| UBA2429 | WRVRLARRLGIPAASLFEAALAKVLEGNEAPERARELAGELLLD |
| (SEQ ID NO: 492) | KIEGDIQQAGRGYWPRFCDPKANPTYDYSATARASASGLTKLAA |
| | VIHAENVTEEALKQVAAEMDLSWTVKLQPDKNFVGAEARARLL |
| | EAAHHFIKVAESPPTKLAEVLARFPDGLALWQALPEKIAALPEET |
| | QVPRNRKASPDLTFATLLFQHFPSLFTAAVLGLSVGKPKSVKAPK |
| | VVEKVSARRKANAVTQAVVIEEPEIDFAELGDDPIKLARGERGFV |
| | FPAFTSLSFWAVPGPHVPVWKEFDIAAFKEALKTVNQFKLKTSER |
| | NALLAEAQRRLDYMDEKTHDWKTGDSDEPGHIPPRLKSDPNFTL |
| | IQALTQDEGVSNKATGDQHIPKGVYTGGLRGFYAIKKDWCELWE |
| | RKADKSQGTPTEEELISIVTDYQRDHVYDVGDVGLFRALCEPRF |
| | WPLWQPLTDEQEAERIKAGRAKDMISAYRVWLELQEDVVRLAQ |
| | PIRFTPAHAENSRRLFMFSDISGSHGAEFGSDGKSLEVSIAYDVDG |
| | KLQPVRAKLEFSAPRAARDELEGLSGGSESMRWFQPMMKALDC |
| | PEVEMPALEKCAVSLMPDVVKKGGGKWVRLLLNFPATLEPEGLI |
| | RHIGKQAMWYKQFNGTYKPRTQQLDTGLHLYWPGLEKAPEAED |
| | AAAWWNREEIRAKGFSVLSVDLGQRDAGAWALLESRSDKAFSR |
| | NRQPFIELGEAGGKLWSTALLGLGMLRLPGEDARTGALDDQGKR |
| | AVEFHGKAGRNALEAEWQEAREMALLFGGEEAKSRLGPGFDHL |
| | SHSKQNEELLRILSRAQSRLARFHRWSCRIHEKPEATGDDVIDYG |
| | QVDELLTKTAEAMLENLKALYTNAGGILDSKSKQPLTLVGLRKK |
| | LEAQKVEPEKIAAVLKPHAEIIFQRLGTLIPELKQHLRVSLERLAN |
| | RELPLRHREWVWNEAFEKLEQGNFKKEENPKWIRGQRGLSMART |
| | EQIENLRKRFMSLRRQMSLIPGEQVKQGVEDKGQRQPEPCEDILN |
| | KLDRMKQQRVNQTAHLILAQALGLRLRPHLANDAEREEKDIHGE |
| | YELIPGRKPVDFIVMEDLSRYLSSQGRAPSENGRLMKWCHRAVL |
| | AKLKQMCEPFGIPVLEVPAAYSSRFCALTGVPGFRAVEVHDGNA |
| | EDFRWKRLIKKAEKDKSSKDAEAAAMLFDQLHDLNIEAREARKQ |
| | DKKLPLRTLFAPVAGGPLFIPMVGGGPRQADMNAAINLGLRAIAS |
| | PTCLRARPKIRAELKDGKHQAMLGNKLEKAAALTLEPPKEPTKE |
| | LAAQKRTNFFLDEKFVGKFDTAHVTTSGKKLRLSGGMSLWKAIK |
| | DGAWQRVKKINDARIAKWKNNPPPEPDPDDEIQF |
| Alicyclobacillus | MAVKSIKVKLRLSECPDILAGMWQLHRATNAGVRYYTEWVSLM |
| kakegawensis | RQEILYSRGPDGGQQCYMTAEDCQRELLRRLRNRQLHNGRQDQP |
| (SEQ ID NO: 493) | GTDADLLAISRRLYEILVLQSIGKRGDAQQIASSFLSPLVDPNSKG |
| | GRGEAKSGRKPAWQKMRDQGDPRWVAAREKYEQRKAVDPSKE |
| | ILNSLDALGLRPLFAVFTETYRSGVDWKPLGKSQGVRTWDRDMF |
| | QQALERLMSWESWNRRVGEEYARLFQQKMKFEQEHFAEQSHLV |
| | KLARALEADMRAASQGFEAKRGTAHQITRRALRGADRVFEIWKS |
| | IPEEALFSQYDEVIRQVQAEKRRDFGSHDLFAKLAEPKYQPLWRA |
| | DETFLTRYALYNGVLRDLEKARQFATFTLPDACVNPIWTRFESSQ |
| | GSNLHKYEFLFDHLGPGRHAVRFQRLLVVESEGAKERDSVVVPV |
| | APSGQLDKLVLREEEKSSVALHLHDTARPDGFMAEWAGAKLQY |
| | ERSTLARKARRDKQGMRSWRRQPSMLMSAAQMLEDAKQAGDV |
| | YLNISVRVKSPSEVRGQRRPPYAALFRIDDKQRRVTVNYNKLSAY |
| | LEEHPDKQIPGAPGLLSGLRVMSVDLGLRTSASISVFRVAKKEEV |
| | EALGDGRPPHYYPIHGTDDLVAVHERSHLIQMPGETETKQLRKLR |
| | EERQAVLRPLFAQLALLRLLVRCGAADERIRTRSWQRLTKQGRE |
| | FTKRLTPSWREALELELTRLEAYCGRVPDDEWSRIVDRTVIALWR |
| | RMGKQVRDWRKQVKSGAKVKVKGYQLDVVGGNSLAQIDYLEQ |
| | QYKFLRRWSFFARASGLVVRADRESHFAVALRQHIENAKRDRLK |
| | KLADRILMEALGYVYEASGPREGQWTAQHPPCQLIILEELSAYRF |
| | SDDRPPSENSKLMAWGHRGILEELVNQAQVHDVLVGTVYAAFSS |
| | RFDARTGAPGVRCRRVPARFVGATVDDSLPLWLTEFLDKHRLDK |
| | NLLRPDDVIPTGEGEFLVSPCGEEAARVRQVHADINAAQNLQRRL |
| | WQNFDITELRLRCDVKMGGEGTVLVPRVNNARAKQLFGKKVLV |
| | SQDGVTFFERSQTGGKPHSEKQTDLTDKELELIAEADEARAKSVV |
| | LFRDPSGHIGKGHWIRQREFWSLVKQRIESHTAERIRVRGVGSSL |
| | D |
| Bacillus sp._V3- | MAIRSIKLKMKTNSGTDSIYLRKALWRTHQLINEGIAYYMNLLTL |
| 13 | YRQEAIGDKTKEAYQAELINIIRNQQRNNGSSEEHGSDQEILALLR |
| (SEQ ID NO: 494) | QLYELIIPSSIGESGDANQLGNKFLYPLVDPNSQSGKGTSNAGRKP |
| | RWKRLKEEGNPDWELEKKKDEERKAKDPTVKIFDNLNKYGLLP |
| | LFPLFTNIQKDIEWLPLGKRQSVRKWDKDMFIQAIERLLSWESWN |
| | RRVADEYKQLKEKTESYYKEHLTGGEEWIEKIRKFEKERNMELE |
| | KNAFAPNDGYFITSRQIRGWDRVYEKWSKLPESASPEELWKVVA |
| | EQQNKMSEGFGDPKVFSFLANRENRDIWRGHSERIYHIAAYNGL |
| | QKKLSRTKEQATFTLPDAIEHPLWIRYESPGGTNLNLFKLEEKQK |
| | KNYYVTLSKIIWPSEEKWIEKENIEIPLAPSIQFNRQIKLKQHVKGK |
| | QEISFSDYSSRISLDGVLGGSRIQFNRKYIKNHKELLGEGDIGPVFF |
| | NLVVDVAPLQETRNGRLQSPIGKALKVISSDFSKVIDYKPKELMD |
| | WMNTGSASNSFGVASLLEGMRVMSIDMGQRTSASVSIFEVVKEL |
| | PKDQEQKLFYSINDTELFAIHKRSFLLNLPGEVVTKNNKQQRQER |
| | RKKRQFVRSQIRMLANVLRLETKKTPDERKKAIHKLMEIVQSYDS |
| | WTASQKEVWEKELNLLTNMAAFNDEIWKESLVELHHRIEPYVG |
| | QIVSKWRKGLSEGRKNLAGISMWNIDELEDTRRLLISWSKRSRTP |
| | GEANRIETDEPFGSSLLQHIQNVKDDRLKQMANLIIMTALGFKYD |
| | KEEKDRYKRWKETYPACQIILFENLNRYLFNLDRSRRENSRLMK |
| | WAHRSIPRTVSMQGEMFGLQVGDVRSEYSSRFHAKTGAPGIRCH |
| | ALTEEDLKAGSNTLKRLIEDGFINESELAYLKKGDIIPSQGGELFV |
| | TLSKRYKKDSDNNELTVIHADINAAQNLQKRFWQQNSEVYRVPC |
| | QLARMGEDKLYIPKSQTETIKKYFGKGSFVKNNTEQEVYKWEKS |
| | EKMKIKTDTTFDLQDLDGFEDISKTIELAQEQQKKYLTMFRDPSG |
| | YFFNNETWRPQKEYWSIVNNIIKSCLKKKILSNKVEL |
| Desulfatirhabdium | MPLSNNPPVTQRAYTLRLRGADPSDLSWREALWHTHEAVNKGA |
| butyrativorans | KVFGDWLLTLRGGLDHTLADTKVKGGKGKPDRDPTPEERKARRI |
| (SEQ ID NO: 495) | LLALSWLSVESKLGAPSSYIVASGDEPAKDRNDNVVSALEEILQS |
| | RKVAKSEIDDWKRDCSASLSAAIRDDAVWVNRSKVFDEAVKSV |
| | GSSLTREEAWDMLERFFGSRDAYLTPMKDPEDKSSETEQEDKAK |
| | DLVQKAGQWLSSRYGTSEGADFCRMSDIYGKIAAWADNASQGG |
| | SSTVDDLVSELRQHFDTKESKATNGLDWIIGLSSYTGHTPNPVHE |
| | LLRQNTSLNKSHLDDLKKKANTRAESCKSKIGSKGQRPYSDAILN |
| | DVESVCGFTYRVDKDGQPVSVADYSKYDVDYKWGTARHYIFAV |
| | MLDHAARRISLAHKWIKRAEAERHKFEEDAKRIANVPARAREWL |
| | DSFCKERSVTSGAVEPYRIRRRAVDGWKEVVAAWSKSDCKSTED |
| | RIAAARALQDDSEIDKFGDIQLFEALAEDDALCVWHKDGEATNE |
| | PDFQPLIDYSLAIEAEFKKRQFKVPAYRHPDELLHPVFCDFGKSR |
| | WKINYDVHKNVQAPFYRGLCLTLWTGSEIKPVPLCWQSKRLTRD |
| | LALGNNHRNDAASAVTRADRLGRAASNVTKSDMVNITGLFEQA |
| | DWNGRLQAPRQQLEAIAVVRDNPRLSEQERNLRMCGMIEHIRWL |
| | VTFSVKLQPQGPWCAYAEQHGLNTNPQYWPHADTNRDRKVHA |
| | RLILPRLPGLRVLSVDLGHRYAAACAVWEAVNTETVKEACQNV |
| | GRDMPKEHDLYLHIKVKKQGIGKQTEVDKTTIYRRIGADTLPDG |
| | RPHPAPWARLDRQFLIKLQGEEKDAREASNEEIWALHQMECKLD |
| | RTKPLIDRLIASGWGLLKRQMARLDALKELGWIPAPDSSENLSRE |
| | DGEAKDYRESLAVDDLMFSAVRTLRLALQRHGNRARIAYYLISE |
| | VKIRPGGIQEKLDENGRIDLLQDALALWHELFSSPGWRDEAAKQ |
| | LWDSRIATLAGYKAPEENGDNVSDVAYRKKQQVYREQLRNVAK |
| | TLSGDVITCKELSDAWKERWEDEDQRWKKLLRWFKDWVLPSGT |
| | QANNATIRNVGGLSLSRLATITEFRRKVQVGFFTRLRPDGTRHEIG |
| | EQFGQKTLDALELLREQRVKQLASRIAEAALGIGSEGGKGWDGG |
| | KRPRQRINDSRFAPCHAVVIENLANYRPDETRTRLENRRLMTWS |
| | ASKVHKYLSEACQLNGLYLCTVSAWYTSRQDSRTGAPGIRCQDV |
| | SVREFMQSPFWRKQVKQAEAKHDENKGDARERFLCELNKTWKA |
| | KTPAEWKKAGFVRIPLRGGEIFVSADSKSPSAKGIHADLNAAANI |
| | GLRALTDPDWPGKWWYVPCDPVSFESKMDYVKGCAAVKVGQP |
| | LRQPAQTNADGAASKIRKGKKNRTAGTSKEKVYLWRDISAFPLE |
| | SNEIGEWKETSAYQNDVQYRVIRMLKEHIKSLDNRTGDNVEG |
| Desulfonatronum | MVLGRKDDTAELRRALWTTHEHVNLAVAEVERVLLRCRGRSY |
| thiodismutans | WTLDRRGDPVHVPESQVAEDALAMAREAQRRNGWPVVGEDEEI |
| (SEQ ID NO: 496) | LLALRYLYEQIVPSCLLDDLGKPLKGDAQKIGTNYAGPLFDSDTC |
| | RRDEGKDVACCGPFHEVAGKYLGALPEWATPISKQEFDGKDASH |
| | LRFKATGGDDAFFRVSIEKANAWYEDPANQDALKNKAYNKDD |
| | WKKEKDKGISSWAVKYIQKQLQLGQDPRTEVRRKLWLELGLLPL |
| | FIPVFDKTMVGNLWNRLAVRLALAHLLSWESWNHRAVQDQALA |
| | RAKRDELAALFLGMEDGFAGLREYELRRNESIKQHAFEPVDRPY |
| | VVSGRALRSWTRVREEWLRHGDTQESRKNICNRLQDRLRGKFG |
| | DPDVFHWLAEDGQEALWKERDCVTSFSLLNDADGLLEKRKGYA |
| | LMTFADARLHPRWAMYEAPGGSNLRTYQIRKTENGLWADVVLL |
| | SPRNESAAVEEKTFNVRLAPSGQLSNVSFDQIQKGSKMVGRCRY |
| | QSANQQFEGLLGGAEILFDRKRIANEQHGATDLASKPGHVWFKL |
| | TLDVRPQAPQGWLDGKGRPALPPEAKHFKTALSNKSKFADQVRP |
| | GLRVLSVDLGVRSFAACSVFELVRGGPDQGTYFPAADGRTVDDP |
| | EKLWAKHERSFKITLPGENPSRKEEIARRAAMEELRSLNGDIRRL |
| | KAILRLSVLQEDDPRTEHLRLFMEAIVDDPAKSALNAELFKGFGD |
| | DRFRSTPDLWKQHCHFFHDKAEKVVAERFSRWRTETRPKSSSWQ |
| | DWRERRGYAGGKSYWAVTYLEAVRGLILRWNMRGRTYGEVNR |
| | QDKKQFGTVASALLHHINQLKEDRIKTGADMIIQAARGFVPRKN |
| | GAGWVQVHEPCRLILFEDLARYRFRTDRSRRENSRLMRWSHREI |
| | VNEVGMQGELYGLHVDTTEAGFSSRYLASSGAPGVRCRHLVEED |
| | FHDGLPGMHLVGELDWLLPKDKDRTANEARRLLGGMVRPGML |
| | VPWDGGELFATLNAASQLHVIHADINAAQNLQRRFWGRCGEAIR |
| | IVCNQLSVDGSTRYEMAKAPKARLLGALQQLKNGDAPFHLTSIP |
| | NSQKPENSYVMTPTNAGKKYRAGPGEKSSGEEDELALDIVEQAE |
| | ELAQGRKTFFRDPSGVFFAPDRWLPSEIYWSRIRRRIWQVTLERN |
| | SSGRQERAEMDEMPY |
| Lentisphaeria | MAVELNRIYQGRVNHVYIFDENQNQVSVDNGDDLLFVHHELYQ |
| bacterium | DAINYYLVALAAMALDSKDSLFGKFKMQIRAVWNDFYRNGQLR |
| (SEQ ID NO: 497) | PGLKHSLIRSLGHAAELNTSNGADIAMNLILEDGGIPSEILNAALE |
| | HLAEKCTGDVSQLGKTFFPRFCDTAYHGNWDVDAKSFSEKKGR |
| | QRLVDALYSLHPVQAVQELAPEIEIGWGGVKTQTGKFFTGDEAK |
| | ASLKKAISYFLQDTGKNSPELQEYFSVAGKQPLEQYLGKIDTFPEI |
| | SFGRISSHQNINISNAMWILKFFPDQYSVDLIKNLIPNKKYEIGIAP |
| | QWGDDPVKLSRGKRGYTFRAFTDLAMWEKNWKVFDRAAFSDA |
| | LKTINQFRNKTQERNDQLKRYCAALNWMDGESSDKKPPVEPAD |
| | ADAVDEAATSVLPILAGDKRWNALLQLQKELGICNDFTENELMD |
| | YGLSLRTIRGYQKLRSMMLEKEEKMRAKTADDEEISQALQEIIIKF |
| | QSSHRDTIGSVSLFLKLAEPKYFCVWHDADKNQNFASVDMVAD |
| | AVRYYSYQEEKARLEEPIQITPADARYSRRVSDLYALVYKNAKE |
| | CKTGYGLRPDGNFVFEIAQKNAKGYAPAKVVLAFSAPRLKRDGL |
| | IDKEFSAYYPPVLQAFLREEEAPKQSFKTTAVILMPDWDKNGKRR |
| | ILLNFPIKLDVSAIHQKTDHRFENQFYFANNTNTCLLWPSYQYKK |
| | PVTWYQGKKPFDVVAVDLGQRSAGAVSRITVSTEKREHSVAIGE |
| | AGGTQWYAYRKFSGLLRLPGEDATVIRDGQRTEELSGNAGRLST |
| | EEETVQACVLCKMLIGDATLLGGSDEKTIRSFPKQNDKLLIAFRR |
| | ATGRMKQLQRWLWMLNENGLCDKAKTEISNSDWLVNKNIDNV |
| | LKEEKQHREMLPAILLQIADRVLPLRGRKWDWVLNPQSNSFVLQ |
| | QTAHGSGDPHKKICGQRGLSFARIEQLESLRMRCQALNRILMRKT |
| | GEKPATLAEMRNNPIPDCCPDILMRLDAMKEQRINQTANLILAQA |
| | LGLRHCLHSESATKRKENGMHGEYEKIPGVEPAAFVVLEDLSRY |
| | RFSQDRSSYENSRLMKWSHRKILEKLALLCEVFNVPILQVGAAYS |
| | SKFSANAIPGFRAEECSIDQLSFYPWRELKDSREKALVEQIRKIGH |
| | RLLTFDAKATIIMPRNGGPVFIPFVPSDSKDTLIQADINASFNIGLR |
| | GVADATNLLCNNRVSCDRKKDCWQVKRSSNFSKMVYPEKLSLS |
| | FDPIKKQEGAGGNFFVLGCSERILTGTSEKSPVFTSSEMAKKYPNL |
| | MFGSALWRNEILKLERCCKINQSRLDKFIAKKEVQNEL |
| Laceyella | MSIRSFKLKIKTKSGVNAEELRRGLWRTHQLINDGIAYYMNAVLV |
| sediminis | LLRQEDLFIRNEETNEIEKRSKEEIQGELLERVHKQQQRNQWSGE |
| (SEQ ID NO: 498) | VDDQTLLQTLRHLYEEIVPSVIGKSGNASLKARFFLGPLVDPNNK |
| | TTKDVSKSGPTPKWKKMKDAGDPNWVQEYEKYMAERQTLVRL |
| | EEMGLIPLFPMYTDEVGDIHWLPQASGYTRTWDRDMFQQAIERL |
| | LSWESWNRRVRERRAQFEKKTHDFASRFSESDVQWMNKLREYE |
| | AQQEKSLEENAFAPNEPYALTKKALRGWERVYHSWMRLDSAAS |
| | EEAYWQEVATCQTAMRGEFGDPAIYQFLAQKENHDIWRGYPER |
| | VIDFAELNHLQRELRRAKEDATFTLPDSVDHPLWVRYEAPGGTNI |
| | HGYDLVQDTKRNLTLILDKFILPDENGSWHEVKKVPFSLAKSKQF |
| | HRQVWLQEEQKQKKREVVFYDYSTNLPHLGTLAGAKLQWDRN |
| | FLNKRTQQQIEETGEIGKVFFNISVDVRPAVEVKNGRLQNGLGKA |
| | LTVLTHPDGTKIVTGWKAEQLEKWVGESGRVSSLGLDSLSEGLR |
| | VMSIDLGQRTSATVSVFEITKEAPDNPYKFFYQLEGTELFAVHQR |
| | SFLLALPGENPPQKIKQMREIRWKERNRIKQQVDQLSAILRLHKK |
| | VNEDERIQAIDKLLQKVASWQLNEEIATAWNQALSQLYSKAKEN |
| | DLQWNQAIKNAHHQLEPVVGKQISLWRKDLSTGRQGIAGLSLWS |
| | IEELEATKKLLTRWSKRSREPGVVKRIERFETFAKQIQHHINQVKE |
| | NRLKQLANLIVMTALGYKYDQEQKKWIEVYPACQVVLFENLRS |
| | YRFSYERSRRENKKLMEWSHRSIPKLVQMQGELFGLQVADVYA |
| | AYSSRYHGRTGAPGIRCHALTEADLRNETNIIHELIEAGFIKEEHRP |
| | YLQQGDLVPWSGGELFATLQKPYDNPRILTLHADINAAQNIQKRF |
| | WHPSMWFRVNCESVMEGEIVTYVPKNKTVHKKQGKTFRFVKVE |
| | GSDVYEWAKWSKNRNKNTFSSITERKPPSSMILFRDPSGTFFKEQ |
| | EWVEQKTFWGKVQSMIQAYMKKTIVQRMEE |
| Methylobacterium | MYEAIVLADDANAQLANAFLGPLTDPNSAGFLEAFNKVDRPAPS |
| nodulans (long | WLDQVPASDPIDPAVLAEANAWLDTDAGRAWLVDTGAPPRWRS |
| form) | LAAKQDPIWPREFARKLGELRKEAASGTSAIIKALKRDFGVLPLF |
| (SEQ ID NO: 499) | QPSLAPRILGSRSSLTPWDRLAFRLAVGHLLSWESWCTRARDEHT |
| | ARVQRLEQFSSAHLKGDLATKVSTLREYERARKEQIAQLGLPMG |
| | ERDFLITVRMTRGWDDLREKWRRSGDKGQEALHAIIATEQTRKR |
| | GRFGDPDLFRWLARPENHHVWADGHADAVGVLARVNAMERLV |
| | ERSRDTALMTLPDPVAHPRSAQWEAEGGSNLRNYQLEAVGGEL |
| | QITLPLLKAADDGRCIDTPLSFSLAPSDQLQGVVLTKQDKQQKIT |
| | YCTNMNEVFEAKLGSADLLLNWDHLRGRIRDRVDAGDIGSAFLK |
| | LALDVAHVLPDGVDDQLARAAFHFQSAKGAKSKHADSVQAGLR |
| | VLSIDLGVRSFATCSVFELKDTAPTTGVAFPLAEFRLWAVHERSF |
| | TLELPGENVGAAGQQWRAQADAELRQLRGGLNRHRQLLRAATV |
| | QKGERDAYLTDLREAWSAKELWPFEASLLSELERCSTVADPLWQ |
| | DTCKRAARLYRTEFGAVVSEWRSRTRSREDRKYAGKSMWSVQH |
| | LTDVRRFLQSWSLAGRASGDIRRLDRERGGVFAKDLLDHIDALK |
| | DDRLKTGADLIVQAARGFQRNEFGYWVQKHAPCHVILFEDLSRY |
| | RMRTDRPRRENSQLMQWAHRGVPDMVGMQGEIYGIQDRRDPDS |
| | ARKHARQPLAAFCLDTPAAFSSRYHASTMTPGIRCHPLRKREFED |
| | QGFLELLKRENEGLDLNGYKPGDLVPLPGGEVFVCLNANGLSRIH |
| | ADINAAQNLQRRFWTQHGDAFRLPCGKSAVQGQIRWAPLSMGK |
| | RQAGALGGFGYLEPTGEDSGSCQWRKTTEAEWRRLSGAQKDRD |
| | EAAAAEDEELQGLEEELLERSGERVVFFRDPSGVVLPTDLWFPSA |
| | AFWSIVRAKTVGRLRSHLDAQAEASYAVAAGL |
| Opitutaceae | MSLNRIYQGRVAAVETGTALAKGNVEWMPAAGGDEVLWQHHE |
| bacterium | LFQAAINYYLVALLALADKNNPVLGPLISQMDNPQSPYHVWGSF |
| (SEQ ID NO: 500) | RRQGRQRTGLSQAVAPYITPGNNAPTLDEVFRSILAGNPTDRATL |
| | DAALMQLLKACDGAGAIQQEGRSYWPKFCDPDSTANFAGDPAM |
| | LRREQHRLLLPQVLHDPAITHDSPALGSFDTYSIATPDTRTPQLTG |
| | PKARARLEQAITLWRVRLPESAADFDRLASSLKKIPDDDSRLNLQ |
| | GYVGSSAKGEVQARLFALLLFRHLERSSFTLGLLRSATPPPKNAE |
| | TPPPAGVPLPAASAADPVRIARGKRSFVFRAFTSLPCWHGGDNIH |
| | PTWKSFDIAAFKYALTVINQIEEKTKERQKECAELETDFDYMHGR |
| | LAKIPVKYTTGEAEPPPILANDLRIPLLRELLQNIKVDTALTDGEA |
| | VSYGLQRRTIRGFRELRRIWRGHAPAGTVFSSELKEKLAGELRQF |
| | QTDNSTTIGSVQLFNELIQNPKYWPIWQAPDVETARQWADAGFA |
| | DDPLAALVQEAELQEDIDALKAPVKLTPADPEYSRRQYDFNAVS |
| | KFGAGSRSANRHEPGQTERGHNTFTTEIAARNAADGNRWRATH |
| | VRIHYSAPRLLRDGLRRPDTDGNEALEAVPWLQPMMEALAPLPT |
| | LPQDLTGMPVFLMPDVTLSGERRILLNLPVTLEPAALVEQLGNAG |
| | RWQNQFFGSREDPFALRWPADGAVKTAKGKTHIPWHQDRDHFT |
| | VLGVDLGTRDAGALALLNVTAQKPAKPVHRIIGEADGRTWYASL |
| | ADARMIRLPGEDARLFVRGKLVQEPYGERGRNASLLEWEDARNI |
| | ILRLGQNPDELLGADPRRHSYPEINDKLLVALRRAQARLARLQNR |
| | SWRLRDLAESDKALDEIHAERAGEKPSPLPPLARDDAIKSTDEAL |
| | LSQRDIIRRSFVQIANLILPLRGRRWEWRPHVEVPDCHILAQSDPG |
| | TDDTKRLVAGQRGISHERIEQIEELRRRCQSLNRALRHKPGERPVL |
| | GRPAKGEEIADPCPALLEKINRLRDQRVDQTAHAILAAALGVRLR |
| | APSKDRAERRHRDIHGEYERFRAPADFVVIENLSRYLSSQDRARS |
| | ENTRLMQWCHRQIVQKLRQLCETYGIPVLAVPAAYSSRFSSRDGS |
| | AGFRAVHLTPDHRHRMPWSRILARLKAHEEDGKRLEKTVLDEAR |
| | AVRGLFDRLDRFNAGHVPGKPWRTLLAPLPGGPVFVPLGDATPM |
| | QADLNAAINIALRGIAAPDRHDIHHRLRAENKKRILSLRLGTQRE |
| | KARWPGGAPAVTLSTPNNGASPEDSDALPERVSNLFVDIAGVAN |
| | FERVTIEGVSQKFATGRGLWASVKQRAWNRVARLNETVTDNNR |
| | NEEEDDIPM |

TABLE 12
Tracrs and direct repeats
Phycisphaerae bacterium ST-NAGAB-D1

| | |
|---|---|
| tracer | CAACATGCTCGCTTTGCGAAGGCTGACGGCCCGCT |
| region | CTCATTTGGCATTGCCGGGAGCCGGAGTTTTCGGA |
| | AGAGAGTGTCGACGACTGCTGATCTCCGCATCCGC |
| | GTCCTGTTCGCCAGGCCGGGTCGGGTGTACGGATC |
| | ATGCTGGCAGCAGTCTACGCCG |
| | (SEQ ID NO: 501) |
| putative | CGGAAGAGAGUGUCGACGACUGCUGAUCUCCGCAU |
| mature | CCGCGUCCUGUUCGCCAGGCCGGGU |
| tracr 1 | (SEQ ID NO: 502) |
| putative | CCAACAUGCUCGCUUUGCGAAGGCUGACGGCCCGC |
| mature | UCUCAUUUGGCAUUGCCGGGAGCCGGA |
| tracr 2 | (SEQ ID NO: 503) |
| putative | UCGCUUUGCGAAGGCUGACGGCCCGCUCUCAUUUG |
| mature | GCAUUGCCGGGAGCCGGAGUUUUCGGAAGAGAGUG |
| tracr 3 | UCGACGACUGCUGAUCUCCGCAUCCGCGUCCUGUU |
| | CGCCAGGCCGGGU |
| | (SEQ ID NO: 504) |
| putative | AUGCUCGCUUUGCGAAGGCUGACGGCCCGCUCUCA |
| mature | UUUGGCAUUGCCGGGAGCCGGAGUUUUCGGAAGAG |
| tracr 4 | AGUGUCGACGACUGCUG |
| | (SEQ ID NO: 505) |
| putative | AGUUUUCGGAAGAGAGUGUCGACGACUGCUGAUCU |
| mature | CCGCAUCCGCGUCCUGUUCGCCAGGCCGGGUCGGG |
| tracr 5 | U (SEQ ID NO: 506) |
| putative | CGCCUAUCAGCCAACAUGCUCGCUUUGCGAAGGCU |
| mature | GACGGCCCGCUCUCAUUUGGCAUUGC |
| tracr 6 | (SEQ ID NO: 507) |
| putative | CGCCUAUCAGCCAACAUGCUCGCUUUGCGAAGGCU |
| mature | GACGGCCCGCUCUCAUUUGGCAUUGCCGGGAGCCG |
| tracr 7 | GAGUUUUCGGAAGAGAG |
| | (SEQ ID NO: 508) |
| putative | UGAUCUCCGCAUCCGCGUCCUGUUCGCCAGGCCGG |
| mature | GUCGGGUGUACGGAUCAUGCUGGCAGCAGUCUACG |
| tracr 8 | CCGAGAACAUUCGC |
| | (SEQ ID NO: 509) |
| putative | UGAUCUCCGCAUCCGCGUCCUGUUCGCCAGGCCGG |
| mature | GUCGGGUGUACGGAUCAUGCUGGCAGCAGUCUACG |
| tracr 9 | CCGAGAACAUUCGC |
| | (SEQ ID NO: 510) |
| putative | UCCGCAUCCGCGUCCUGUUCGCCAGGCCGGGUCGG |
| mature | GUGUACGGAUCAUGCUGGCAGCAGUCUACGCCGAG |
| tracr 10 | AACAUUCGCUUUU |
| | (SEQ ID NO: 511) |
| direct | GGCGCAACCCGCACACAACCGCGAATGGACAC |
| repeat | (SEQ ID NO: 512) |
| mature | CCGCGAATGGACAC (SEQ ID NO: 513) |
| direct | |
| repeat | |

[1606] Table 13 shows additional example Cas12b orthologs.

TABLE 13
C2c1 orthologs

| | GenBank |
|---|---|
| | Identifier (GI) |
| Host | number |
| Alicyclobacillus acidoterrestris | 544884152 |
| Alicyclobacillus contaminans | 652589596 |
| Desulfovibrio inopinatus | 652932497 |
| Desulfonatronum thiodismutans | 667765471 |
| Opitutaceae bacterium TAV5 | 497199019 |
| Tuberibacillus calidus | 654153037 |
| Bacillus thermoamylovorans | 754485389 |
| Brevibacillus sp. CF 112 | 495056180 |
| Bacillus sp. NSP2-1 | 651512544 |
| Desulfatirhabdium butyrativorans | 654874074 |
| Alicyclobacillus herbarius | 652569729 |
| Alicyclobacillus contaminans | 652589403 |
| Citrobacter freundii ATCC 8090 | 411770298 |
| Citrobacter freundii | 696372964 |
| Brevi bacillus agri | 492410745 |
| Brevi bacillus agri | 492410748 |
| Brevibacillus sp. CF 112 | 495062547 |
| Methylobacterium nodulans | 506407588 |
| Methylobacterium nodulans ORS 2060 | 219945206 |
| Methylobacterium nodulans | 760065057 |

### Example 2—Choice and Designs of Adenosine Deaminases

[1607] A number of ADs are used, and each will have varying levels of activity. These ADs include:

1. Human ADARs (hADAR1, hADAR2, hADAR3)
2. Squid Loligo pealeii ADARs (sqADAR2a, sqADAR2b)
3. ADATs (human ADAT, Drosophila ADAT)

[1608] Mutations can also be used to increase the activity of ADAR reacting against a DNA-RNA heteroduplex. For example, for the human ADAR genes, the hADAR1d(E1008Q) or hADAR2d(E488Q) mutation is used to increase their activity against a DNA-RNA target.

[1609] Each ADAR has varying levels of sequence context requirement. For example, for hADAR1d (E1008Q), tAg and aAg sites are efficiently deaminated, whereas aAt and cAc are less efficiently edited, and gAa and gAc are even less edited. However, the context requirement will vary for different ADARs.

[1610] A schematic showing of one version of the system is provided in FIG. 1. The amino acid sequences of example Cpf1-AD fusion proteins are provided in FIGS. 2 to 4.

### Example 3—Characterization of C2c1 (Cas12b) from Phycisphaerae bacterium ST-NAGAB-D1

[1611] E. coli (Stb13) were transformed with a low copy plasmid (pACYC184) containing parts of the endogenous genomic sequence of the Phycisphaerae bacterium CRISPR-C2c1 locus. Whole RNA was extracted form cells cultured for 14h and RNA was prepped for and analyzed by small RNA sequencing. The methods were as described by Zetsche et al. 2015.

[1612] Small RNAseq revealed the location of the tracer RNA and the architecture of the mature crRNAs. Mature crRNA are most likely 14 nt of the direct repeat followed by 20-24 nt of guide sequence. Potential tracr sequences with high read numbers are shown in FIG. 2 and sequences shown in Table 12. Structures of tracrRNA duplexes with direct repeats (DR) based on RNA fold prediction are depicted in FIG. 2.

[1613] PAM screening was performed as in Zetsche et al., 2015. In particular, Stb13 E. coli were transformed with 10 ng plasmid DNA encoding different PAM sequences located 5′ of a recognizable protospacer, and colony counts performed. Reduced colony formation was confirmed for TTH PAMs (H=A, T, C).

### Example 4—Colorimetric Detection

[1614] DNA quadruplexes can be used for biomolecule analyte detection (FIG. 6). In one case, the OTA-aptamer (blue) recognizes OTA, causing a conformational change that exposes the quadruplex (red) to bind hemin. The hemin-quadruplex complex has peroxidase activity which can then oxidize the TMB substrate to a colored form (generally blue in solution). Accordingly, the quadruplexes can be degraded by CRISPR collateral activity described herein. Applicants have also created RNA forms of these quadruplexes that can be degraded as part of the CRISPR collateral activity described herein. Degradation causes a loss of RNA aptamer and thus a loss of color signal in the presence of nucleic acid target. Two exemplary designs are illustrated below.

(SEQ ID NO: 514)
1) rUrGrGrGrUrUrGrGrGrUrUrGrGrGrUrUrGrGrGrA
(SEQ ID NO: 515)
2) rUrGrGrGrUrUrUrGrGrGrUrUrUrGrGrGrUrUrUrGrGrGrA

[1615] The guanines form the key base pairs that generate the quadruplex structure and this then binds the hemin molecule. Applicants spaced the sets of guanines with uridine (shown in Bold) to allow degradation of the quadruplex as the di-nucleotide data shows that guanines are poorly degraded.

[1616] The colorimetric assay is applicable for use in diagnostic assays as described herein. In one embodiment, appropriate quadruplexes are incubated with a test sample and a Cas12 system. In another embodiment, appropriate quadruplexes are incubated with a test sample and a Cas13 system. For example, after an incubation period to allow Cas13 identification of a target sequence and for degradation of aptamers by collateral activity, substrate may be added. Absorbance may then be measured. In other embodiments, the substrate is included in the assay with the quadruplexes and a CRISPR Cas9, Cas12 or Cas13 system.

### Example 5

[1617] FIG. 13 shows different sgRNAs. FIG. 14 shows indel percentage obtained with the different sgRNAs of FIG. 13 after plasmid transfection, for different target sites. Cas12b used was from Bacillus hisashii strain C4.

### Example 6

[1618] Table 14 shows exemplary orthologs of Cas12b.

TABLE 14

| | Accession | | |
|---|---|---|---|
| Name | No. | Organism | Sequence |
| Aac | WP_0212 | Alicyclobacillus | MAVKSIKVKLRLDDMPEIRAGLWKLHKEV |
| (Alicyclobacillus | 96342 | acidoterrestris | NAGVRYYTEWLSLLRQENLYRRSPNGDGE |
| acidoterrestris) | | | QECDKTAEECKAELLERLRARQVENGHRG |
| (SEQ ID NO: 516) | | | PAGSDDELLQLARQLYELLVPQAIGAKGD |
| | | | AQQIARKFLSPLADKDAVGGLGIAKAGNK |
| | | | PRWVRMREAGEPGWEEEKEKAETRKSAD |
| | | | RTADVLRALADFGLKPLMRVYTDSEMSSV |
| | | | EWKPLRKGQAVRTWDRDMFQQAIERMMS |
| | | | WESWNQRVGQEYAKLVEQKNRFEQKNFV |
| | | | GQEHLVHLVNQLQQDMKEASPGLESKEQT |
| | | | AHYVTGRALRGSDKVFEKWGKLAPDAPF |
| | | | DLYDAEIKNVQRRNTRRFGSHDLFAKLAEP |
| | | | EYQALWREDASFLTRYAVYNSILRKLNHA |
| | | | KMFATFTLPDATAHPIWTRFDKLGGNLHQ |
| | | | YTFLFNEFGERRHAIRFHKLLKVENGVARE |
| | | | VDDVTVPISMSEQLDNLLPRDPNEPIALYFR |
| | | | DYGAEQHFTGEFGGAKIQCRRDQLAHMHR |
| | | | RRGARDVYLNVSVRVQSQSEARGERRPPY |
| | | | AAVFRLVGDNHRAFVHFDKLSDYLAEHPD |
| | | | DGKLGSEGLLSGLRVMSVDLGLRTSASISV |
| | | | FRVARKDELKPNSKGRVPFFFPIKGNDNLV |
| | | | AVHERSQLLKLPGETESKDLRAIREERQRT |
| | | | LRQLRTQLAYLRLLVRCGSEDVGRRERSW |
| | | | AKLIEQPVDAANHMTPDWREAFENELQKL |
| | | | KSLHGICSDKEWMDAVYESVRRVWRHMG |
| | | | KQVRDWRKDVRSGERPKIRGYAKDVVGG |
| | | | NSIEQIEYLERQYKFLKSWSFFGKVSGQVIR |
| | | | AEKGSRFAITLREHIDHAKEDRLKKLADRII |
| | | | MEALGYVYALDERGKGKWVAKYPPCQLI |
| | | | LLEELSEYQFNNDRPPSENNQLMQWSHRG |
| | | | VFQELINQAQVHDLLVGTMYAAFSSRFDA |
| | | | RTGAPGIRCRRVPARCTQEHNPEPFPWWL |
| | | | NKFVVEHTLDACPLRADDLIPTGEGEIFVSP |
| | | | FSAEEGDFHQIHADLNAAQNLQQRLWSDF |
| | | | DISQIRLRCDWGEVDGELVLIPRLTGKRTA |
| | | | DSYSNKVFYTNTGVTYYERERGKKRRKVF |
| | | | AQEKLSEEEAELLVEADEAREKSVVLMRD |
| | | | PSGIINRGNWTRQKEFWSMVNQRIEGYLV |
| | | | KQIRSRVPLQDSACENTGDI |
| Ak | WP_0679 | Alicyclobacillus | MAVKSIKVKLRLSECPDILAGMWQLHRAT |
| (Alicyclobacillus | 36067 | kakegawensis | NAGVRYYTEWVSLMRQEILYSRGPDGGQQ |
| kakegawensis) | | | CYMTAEDCQRELLRRLRNRQLHNGRQDQP |
| (SEQ ID NO: 517) | | | GTDADLLAISRRLYEILVLQSIGKRGDAQQI |
| | | | ASSFLSPLVDPNSKGGRGEAKSGRKPAWQ |
| | | | KMRDQGDPRWVAAREKYEQRKAVDPSKE |
| | | | ILNSLDALGLRPLFAVFTETYRSGVDWKPL |
| | | | GKSQGVRTWDRDMFQQALERLMSWESW |
| | | | NRRVGEEYARLFQQKMKFEQEHFAEQSHL |
| | | | VKLARALEADMRAASQGFEAKRGTAHQIT |
| | | | RRALRGADRVFEIWKSIPEEALFSQYDEVIR |
| | | | QVQAEKRRDFGSHDLFAKLAEPKYQPLWR |
| | | | ADETFLTRYALYNGVLRDLEKARQFATFT |
| | | | LPDACVNPIWTRFESSQGSNLHKYEFLFDH |
| | | | LGPGRHAVRFQRLLVVESEGAKERDSVVV |
| | | | PVAPSGQLDKLVLREEEKSSVALHLHDTAR |
| | | | PDGFMAEWAGAKLQYERSTLARKARRDK |
| | | | QGMRSWRRQPSMLMSAAQMLEDAKQAG |
| | | | DVYLNISVRVKSPSEVRGQRRPPYAALFRI |
| | | | DDKQRRVTVNYNKLSAYLEEHPDKQIPGA |
| | | | PGLLSGLRVMSVDLGLRTSASISVFRVAKK |
| | | | EEVEALGDGRPPHYYPIHGTDDLVAVHERS |
| | | | HLIQMPGETETKQLRKLREERQAVLRPLFA |
| | | | QLALLRLLVRCGAADERIRTRSWQRLTKQ |
| | | | GREFTKRLTPSWREALELELTRLEAYCGRV |
| | | | PDDEWSRIVDRTVIALWRRMGKQVRDWR |
| | | | KQVKSGAKVKVKGYQLDVVGGNSLAQID |
| | | | YLEQQYKFLRRWSFFARASGLVVRADRES |
| | | | HFAVALRQHIENAKRDRLKKLADRILMEA |
| | | | LGYVYEASGPREGQWTAQHPPCQLIILEEL |
| | | | SAYRFSDDRPPSENSKLMAWGHRGILEELV |
| | | | NQAQVHDVLVGTVYAAFSSRFDARTGAPG |
| | | | VRCRRVPARFVGATVDDSLPLWLTEFLDK |
| | | | HRLDKNLLRPDDVIPTGEGEFLVSPCGEEA |
| | | | ARVRQVHADINAAQNLQRRLWQNFDITEL |
| | | | RLRCDVKMGGEGTVLVPRVNNARAKQLF |
| | | | GKKVLVSQDGVTFFERSQTGGKPHSEKQT |
| | | | DLTDKELELIAEADEARAKSVVLFRDPSGH |
| | | | IGKGHWIRQREFWSLVKQRIESHTAERIRV |
| | | | RGVGSSLD |
| Am | WP_0749 | Alicyclobacillus | MNVAVKSIKVKLMLGHLPEIREGLWHLHE |
| (Alicyclobacillus | 48407 | macrosporangiidus | AVNLGVRYYTEWLALLRQGNLYRRGKDG |
| macrosporangiidus) | | | AQECYMTAEQCRQELLVRLRDRQKRNGH |
| (SEQ ID NO: 518) | | | TGDPGTDEELLGVARRLYELLVPQSVGKK |
| | | | GQAQMLASGFLSPLADPKSEGGKGTSKSG |
| | | | RKPAWMGMKEAGDSRWVEAKARYEANK |
| | | | AKDPTKQVIASLEMYGLRPLFDVFTETYKT |
| | | | IRWMPLGKHQGVRAWDRDMFQQSLERLM |
| | | | SWESWNERVGAEFARLVDRRDRFREKHFT |
| | | | GQEHLVALAQRLEQEMKEASPGFESKSSQ |
| | | | AHRITKRALRGADGIIDDWLKLSEGEPVDR |
| | | | FDEILRKRQAQNPRRFGSHDLFLKLAEPVF |
| | | | QPLWREDPSFLSRWASYNEVLNKLEDAKQ |
| | | | FATFTLPSPCSNPVWARFENAEGTNIFKYD |
| | | | FLFDHFGKGRHGVRFQRMIVMRDGVPTEV |
| | | | EGIVVPIAPSRQLDALAPNDAASPIDVFVGD |
| | | | PAAPGAFRGQFGGAKIQYRRSALVRKGRR |
| | | | EEKAYLCGFRLPSQRRTGTPADDAGEVFLN |
| | | | LSLRVESQSEQAGRRNPPYAAVFHISDQTR |
| | | | RVIVRYGEIERYLAEHPDTGIPGSRGLTSGL |
| | | | RVMSVDLGLRTSAAISVFRVAHRDELTPDA |
| | | | HGRQPFFFPIHGMDHLVALHERSHLIRLPG |
| | | | ETESKKVRSIREQRLDRLNRLRSQMASLRL |
| | | | LVRTGVLDEQKRDRNWERLQSSMERGGE |
| | | | RMPSDWWDLFQAQVRYLAQHRDASGEA |
| | | | WGRMVQAAVRTLWRQLAKQVRDWRKEV |
| | | | RRNADKVKIRGIARDVPGGHSLAQLDYLE |
| | | | RQYRFLRSWSAFSVQAGQVVRAERDSRFA |
| | | | VALREHIDNGKKDRLKKLADRILMEALGY |
| | | | VYVTDGRRAGQWQAVYPPCQLVLLEELSE |
| | | | YRFSNDRPPSENSQLMVWSHRGVLEELIHQ |
| | | | AQVHDVLVGTIPAAFSSRFDARTGAPGIRC |
| | | | RRVPSIPLKDAPSIPIWLSHYLKQTERDAAA |
| | | | LRPGELIPTGDGEFLVTPAGRGASGVRVVH |
| | | | ADINAAHNLQRRLWENFDLSDIRVRCDRR |
| | | | EGKDGTVVLIPRLTNQRVKERYSGVIFTSE |
| | | | DGVSFTVGDAKTRRRSSASQGEGDDLSDE |
| | | | EQELLAEADDARERSVVLFRDPSGFVNGG |
| | | | RWTAQRAFWGMVHNRIETLLAERFSVSGA |
| | | | AEKVRG |
| Bh (Bacillus | WP_0951 | Bacillus | MATRSFILKIEPNEEVKKGLWKTHEVLNHG |
| hisashii) | 42515 | hisashii | IAYYMNILKLIRQEAIYEHHEQDPKNPKKV |
| (SEQ ID NO: 519) | | | SKAEIQAELWDFVLKMQKCNSFTHEVDKD |
| | | | EVFNILRELYEELVPSSVEKKGEANQLSNK |
| | | | FLYPLVDPNSQSGKGTASSGRKPRWYNLKI |
| | | | AGDPSWEEEKKKWEEDKKKDPLAKILGKL |
| | | | AEYGLIPLFIPYTDSNEPIVKEIKWMEKSRN |
| | | | QSVRRLDKDMFIQALERFLSWESWNLKVK |
| | | | EEYEKVEKEYKTLEERIKEDIQALKALEQY |
| | | | EKERQEQLLRDTLNTNEYRLSKRGLRGWR |
| | | | EIIQKWLKMDENEPSEKYLEVFKDYQRKH |
| | | | PREAGDYSVYEFLSKKENHFIWRNHPEYPY |
| | | | LYATFCEIDKKKKDAKQQATFTLADPINHP |
| | | | LWVRFEERSGSNLNKYRILTEQLHTEKLKK |
| | | | KLTVQLDRLIYPTESGGWEEKGKVDIVLLP |
| | | | SRQFYNQIFLDIEEKGKHAFTYKDESIKFPL |
| | | | KGTLGGARVQFDRDHLRRYPHKVESGNV |
| | | | GRIYFNMTVNIEPTESPVSKSLKIHRDDFPK |
| | | | VVNFKPKELTEWIKDSKGKKLKSGIESLEIG |
| | | | LRVMSIDLGQRQAAAASIFEVVDQKPDIEG |
| | | | KLFFPIKGTELYAVHRASFNIKLPGETLVKS |
| | | | REVLRKAREDNLKLMNQKLNFLRNVLHFQ |
| | | | QFEDITEREKRVTKWISRQENSDVPLVYQD |
| | | | ELIQIRELMYKPYKDWVAFLKQLHKRLEV |
| | | | EIGKEVKHWRKSLSDGRKGLYGISLKNIDE |
| | | | IDRTRKFLLRWSLRPTEPGEVRRLEPGQRF |
| | | | AIDQLNHLNALKEDRLKKMANTIIMHALG |
| | | | YCYDVRKKKWQAKNPACQIILFEDLSNYN |
| | | | PYEERSRFENSKLMKWSRREIPRQVALQGE |
| | | | IYGLQVGEVGAQFSSRFHAKTGSPGIRCSV |
| | | | VTKEKLQDNRFFKNLQREGRLTLDKIAVL |
| | | | KEGDLYPDKGGEKFISLSKDRKCVTTHADI |
| | | | NAAQNLQKRFWTRTHGFYKVYCKAYQVD |
| | | | GQTVYIPESKDQKQKIIEEFGEGYFILKDGV |
| | | | YEWVNAGKLKIKKGSSKQSSSELVDSDILK |
| | | | DSFDLASELKGEKLMLYRDPSGNVFPSDK |
| | | | WMAAGVFFGKLERILISKLTNQYSISTIEDD |
| | | | SSKQSM |
| Bs (Bacillus | WP_0265 | Bacillus sp. | MAIRSIKLKLKTHTGPEAQNLRKGIWRTHR |
| sp. NSP2) | 57978 | NSP2 | LLNEGVAYYMKMLLLFRQESTGERPKEEL |
| (SEQ ID NO: 520) | | | QEELICHIREQQQRNQADKNTQALPLDKAL |
| | | | EALRQLYELLVPSSVGQSGDAQIISRKFLSP |
| | | | LVDPNSEGGKGTSKAGAKPTWQKKKEAN |
| | | | DPTWEQDYEKWKKRREEDPTASVITTLEE |
| | | | YGIRPIFPLYTNTVTDIAWLPLQSNQFVRT |
| | | | WDRDMLQQAIERLLSWESWNKRVQEEYA |
| | | | KLKEKMAQLNEQLEGGQEWISLLEQYEEN |
| | | | RERELRENMTAANDKYRITKRQMKGWNE |
| | | | LYELWSTFPASASHEQYKEALKRVQQRLR |
| | | | GRFGDAHFFQYLMEEKNRLIWKGNPQRIH |
| | | | YFVARNELTKRLEEAKQSATMTLPNARKH |
| | | | PLWVRFDARGGNLQDYYLTAEADKPRSRR |
| | | | FVTFSQLIWPSESGWMEKKDVEVELALSR |
| | | | QFYQQVKLLKNDKGKQKIEFKDKGSGSTF |
| | | | NGHLGGAKLQLERGDLEKEEKNFEDGEIG |
| | | | SVYLNVVIDFEPLQEVKNGRVQAPYGQVL |
| | | | QLIRRPNEFPKVTTYKSEQLVEWIKASPQH |
| | | | SAGVESLASGFRVMSIDLGLRAAAATSIFS |
| | | | VEESSDKNAADFSYWIEGTPLVAVHQRSY |
| | | | MLRLPGEQVEKQVMEKRDERFQLHQRVK |
| | | | FQIRVLAQIMRMANKQYGDRWDELDSLK |
| | | | QAVEQKKSPLDQTDRTFWEGIVCDLTKVL |
| | | | PRNEADWEQAVVQIHRKAEEYVGKAVQA |
| | | | WRKRFAADERKGIAGLSMWNIEELEGLRK |
| | | | LLISWSRRTRNPQEVNRFERGHTSHQRLLT |
| | | | HIQNVKEDRLKQLSHAIVMTALGYVYDER |
| | | | KQEWCAEYPACQVILFENLSQYRSNLDRST |
| | | | KENSTLMKWAHRSIPKYVHMQAEPYGIQI |
| | | | GDVRAEYSSRFYAKTGTPGIRCKKVRGQD |
| | | | LQGRRFENLQKRLVNEQFLTEEQVKQLRP |
| | | | GDIVPDDSGELFMTLTDGSGSKEVVFLQAD |
| | | | INAAHNLQKRFWQRYNELFKVSCRVIVRD |
| | | | EEEYLVPKTKSVQAKLGKGLFVKKSDTAW |
| | | | KDVYVWDSQAKLKGKTTFTEESESPEQLE |
| | | | DFQEIIEEAEEAKGTYRTLFRDPSGVFFPES |
| | | | VWYPQKDFWGEVKRKLYGKLRERFLTKA |
| | | | R |
| Bt (Bacillus | WP_0419 | Bacillus | MATRSFILKIEPNEEVKKGLWKTHEVLNHG |
| thermoamylovorans) | 02512 | thermoamylovorans | IAYYMNILKLIRQEAIYEHHEQDPKNPKKV |
| (SEQ ID NO: 521) | | | SKAEIQAELWDFVLKMQKCNSFTHEVDKD |
| | | | VVFNILRELYEELVPSSVEKKGEANQLSNK |
| | | | FLYPLVDPNSQSGKGTASSGRKPRWYNLKI |
| | | | AGDPSWEEEKKKWEEDKKKDPLAKILGKL |
| | | | AEYGLIPLFIPFTDSNEPIVKEIKWMEKSRN |
| | | | QSVRRLDKDMFIQALERFLSWESWNLKVK |
| | | | EEYEKVEKEHKTLEERIKEDIQAFKSLEQY |
| | | | EKERQEQLLRDTLNTNEYRLSKRGLRGWR |
| | | | EIIQKWLKMDENEPSEKYLEVFKDYQRKH |
| | | | PREAGDYSVYEFLSKKENHFIWRNHPEYPY |
| | | | LYATFCEIDKKKKDAKQQATFTLADPINHP |
| | | | LWVRFEERSGSNLNKYRILTEQLHTEKLKK |
| | | | KLTVQLDRLIYPTESGGWEEKGKVDIVLLP |
| | | | SRQFYNQIFLDIEEKGKHAFTYKDESIKFPL |
| | | | KGTLGGARVQFDRDHLRRYPHKVESGNV |
| | | | GRIYFNMTVNIEPTESPVSKSLKIHRDDFPK |
| | | | FVNFKPKELTEWIKDSKGKKLKSGIESLEIG |
| | | | LRVMSIDLGQRQAAAASIFEVVDQKPDIEG |
| | | | KLFFPIKGTELYAVHRASFNIKLPGETLVKS |
| | | | REVLRKAREDNLKLMNQKLNFLRNVLHFQ |
| | | | QFEDITEREKRVTKWISRQENSDVPLVYQD |
| | | | ELIQIRELMYKPYKDWVAFLKQLHKRLEV |
| | | | EIGKEVKHWRKSLSDGRKGLYGISLKNIDE |
| | | | IDRTRKFLLRWSLRPTEPGEVRRLEPGQRF |
| | | | AIDQLNHLNALKEDRLKKMANTIIMHALG |
| | | | YCYDVRKKKWQAKNPACQIILFEDLSNYN |
| | | | PYEERSRFENSKLMKWSRREIPRQVALQGE |
| | | | IYGLQVGEVGAQFSSRFHAKTGSPGIRCSV |
| | | | VTKEKLQDNRFFKNLQREGRLTLDKIAVL |
| | | | KEGDLYPDKGGEKFISLSKDRKLVTTHADI |
| | | | NAAQNLQKRFWTRTHGFYKVYCKAYQVD |
| | | | GQTVYIPESKDQKQKIIEEFGEGYFILKDGV |
| | | | YEWGNAGKLKIKKGSSKQSSSELVDSDILK |
| | | | DSFDLASELKGEKLMLYRDPSGNVFPSDK |
| | | | WMAAGVFFGKLERILISKLTNQYSISTIEDD |
| | | | SSKQSM |
| Bv (Bacillus | WP_1016 | Bacillus sp. | MAIRSIKLKMKTNSGTDSIYLRKALWRTHQ |
| sp. V3-13) | 61451 | V3-13 | LINEGIAYYMNLLTLYRQEAIGDKTKEAYQ |
| (SEQ ID NO: 522) | | | AELINIIRNQQRNNGSSEEHGSDQEILALLR |
| | | | QLYELIIPSSIGESGDANQLGNKFLYPLVDP |
| | | | NSQSGKGTSNAGRKPRWKRLKEEGNPDW |
| | | | ELEKKKDEERKAKDPTVKIFDNLNKYGLLP |
| | | | LFPLFTNIQKDIEWLPLGKRQSVRKWDKD |
| | | | MFIQAIERLLSWESWNRRVADEYKQLKEK |
| | | | TESYYKEHLTGGEEWIEKIRKFEKERNMEL |
| | | | EKNAFAPNDGYFITSRQIRGWDRVYEKWS |
| | | | KLPESASPEELWKVVAEQQNKMSEGFGDP |
| | | | KVFSFLANRENRDIWRGHSERIYHIAAYNG |
| | | | LQKKLSRTKEQATFTLPDAIEHPLWIRYESP |
| | | | GGTNLNLFKLEEKQKKNYYVTLSKIIWPSE |
| | | | EKWIEKENIEIPLAPSIQFNRQIKLKQHVKG |
| | | | KQEISFSDYSSRISLDGVLGGSRIQFNRKYI |
| | | | KNHKELLGEGDIGPVFFNLVVDVAPLQETR |
| | | | NGRLQSPIGKALKVISSDFSKVIDYKPKELM |
| | | | DWMNTGSASNSFGVASLLEGMRVMSIDM |
| | | | GQRTSASVSIFEVVKELPKDQEQKLFYSIND |
| | | | TELFAIHKRSFLLNLPGEVVTKNNKQQRQE |
| | | | RRKKRQFVRSQIRMLANVLRLETKKTPDE |
| | | | RKKAIHKLMEIVQSYDSWTASQKEVWEKE |
| | | | LNLLTNMAAFNDEIWKESLVELHHRIEPYV |
| | | | GQIVSKWRKGLSEGRKNLAGISMWNIDEL |
| | | | EDTRRLLISWSKRSRTPGEANRIETDEPFGS |
| | | | SLLQHIQNVKDDRLKQMANLIIMTALGFK |
| | | | YDKEEKDRYKRWKETYPACQIILFENLNR |
| | | | YLFNLDRSRRENSRLMKWAHRSIPRTVSM |
| | | | QGEMFGLQVGDVRSEYSSRFHAKTGAPGI |
| | | | RCHALTEEDLKAGSNTLKRLIEDGFINESEL |
| | | | AYLKKGDIIPSQGGELFVTLSKRYKKDSDN |
| | | | NELTVIHADINAAQNLQKRFWQQNSEVYR |
| | | | VPCQLARMGEDKLYIPKSQTETIKKYFGKG |
| | | | SFVKNNTEQEVYKWEKSEKMKIKTDTTFD |
| | | | LQDLDGFEDISKTIELAQEQQKKYLTMFRD |
| | | | PSGYFFNNETWRPQKEYWSIVNNIIKSCLK |
| | | | KKILSNKVEL |
| CLb | OGH5599 | Candidatus | MPRDDLDLLTNLNSTAKGIRERGKTKEGT |
| (Candidatus | 4 | Lindowbacteria | DKKKSGRKSSWPMDKAAWETAKTSDSSA |
| Lindowbacteria) | | | HFLEKLKQHPDLKDAFGNLSSGGSKKLEY |
| (SEQ ID NO: 523) | | | YKKLAGSAPWKESQSVILEKAARWKEAKQ |
| | | | EREEKEQDSSEHGSKAAYRRLFDAGCLPM |
| | | | PEFAKYIDENQIEFGDLKLSDCGAEWKRG |
| | | | MWNQAGQRVRSHMGWQRRREKENAVYS |
| | | | LRKELFEKGGAIRRKKSEELTPEDILPGKAA |
| | | | PDQNDWQERPAYGNQMWFIGLRSYEENE |
| | | | MAKYAEEAGMGSRSAPRIRRGTIKGWSKL |
| | | | RERWLQILKRNPQATRDDLIGELNALRSQD |
| | | | PRAYGDARLFDWLSKTDQRFLWDGFDAD |
| | | | GKILCGRDDRDCVSAFVAYNEEFADEPSSI |
| | | | TLTETDERLHPVWPFFGESSAVPYEIEYDLE |
| | | | TACPTAIRLPLLVGKENGGYAERQGTRLPL |
| | | | AEYADLASSFQLPTPVRLDVLVEIREVTRA |
| | | | GRKVTCPFSYFKQNGVWYVREGEIPSGESI |
| | | | QIKQTDRKIENGKIFISSKLRMAYRDDLMV |
| | | | SPATGDFGSIKILWERIELASHVDQKKLPET |
| | | | APARSRVFVSFSCNVVERAPRKQLTRKPDA |
| | | | VVVTIPSGVDQGLVVVSTDVRTGKSKSSSA |
| | | | PPLPPGSRLWPADAVHGDPPLRILSVDLGH |
| | | | RHSAYAVWELGLQQKSWRAGVLKGSTQT |
| | | | PVYADCTGTGLLCLPGDGEDTPAEEESLRL |
| | | | RSRQIRRRLNLQNSILRVSRLLSLDKFEKTIF |
| | | | EQSDVRDRPNKKGLRIRRRCRTEKTPLSEA |
| | | | EVRKNCDKAAEILIRWADTDAMAKSLAAT |
| | | | GNADISFWKYMAVKNPPLSAVVDVAPSTI |
| | | | VPDDGPDRETLKKKRQEEEEKFASSIYENR |
| | | | VKLAGALCSGYDADHRRPATGGLWHDLD |
| | | | RTLIREISYGDRGQKGNPRKLNNEGILRLLR |
| | | | RPPRARPDWREFHRTLNDANRIPKGRTLRG |
| | | | GLSMGRLNFLKEVGDFVKKWSCRPRWPG |
| | | | DRRHIPPGQLFDRQDAEHLEHLRDDRIKRL |
| | | | AHLIVAQALGFEPDIRRGLWKYVDGSTGEI |
| | | | LWQHPETRRFFAEGAAGELREVSRPAEIDD |
| | | | DAAARPHTVSAPAHIVVFENLIRYRFQSDR |
| | | | PKTENAGLMQWAHRQIVHFTKQVASLYGL |
| | | | KVAMVYAAFSSKFCSRCGSPGARVSRFDP |
| | | | AWRNQEWFKRRTSNPRSKVDHSLKRASED |
| | | | PTADETRPWVLIEGGKEFVCANAKCSAHD |
| | | | EPLNADENAAANIGLRFLRGVEDFRTKVNP |
| | | | AGALKGKLRFETGIHSFRPPVSGSPFWSPM |
| | | | AEPAQKKKIGAAAPGADVDEAGDADESGV |
| | | | VVLFRDPSGAFRNKQYWYEGKIFWSNVM |
| | | | MAVEAKIAGASVGAKPVAASWGQAQPQS |
| | | | GPGLAKPGGD |
| Db | WP_0283 | Desulfatirhabdium | MPLSNNPPVTQRAYTLRLRGADPSDLSWR |
| (Desulfatirhabdium | 26052 | butyrativorans | EALWHTHEAVNKGAKVFGDWLLTLRGGL |
| butyrativorans) | | | DHTLADTKVKGGKGKPDRDPTPEERKARR |
| (SEQ ID NO: 524) | | | ILLALSWLSVESKLGAPSSYIVASGDEPAKD |
| | | | RNDNVVSALEEILQSRKVAKSEIDDWKRD |
| | | | CSASLSAAIRDDAVWVNRSKVFDEAVKSV |
| | | | GSSLTREEAWDMLERFFGSRDAYLTPMKD |
| | | | PEDKSSETEQEDKAKDLVQKAGQWLSSRY |
| | | | GTSEGADFCRMSDIYGKIAAWADNASQGG |
| | | | SSTVDDLVSELRQHFDTKESKATNGLDWII |
| | | | GLSSYTGHTPNPVHELLRQNTSLNKSHLDD |
| | | | LKKKANTRAESCKSKIGSKGQRPYSDAILN |
| | | | DVESVCGFTYRVDKDGQPVSVADYSKYD |
| | | | VDYKWGTARHYIFAVMLDHAARRISLAHK |
| | | | WIKRAEAERHKFEEDAKRIANVPARAREW |
| | | | LDSFCKERSVTSGAVEPYRIRRRAVDGWK |
| | | | EVVAAWSKSDCKSTEDRIAAARALQDDSEI |
| | | | DKFGDIQLFEALAEDDALCVWHKDGEATN |
| | | | EPDFQPLIDYSLAIEAEFKKRQFKVPAYRHP |
| | | | DELLHPVFCDFGKSRWKINYDVHKNVQAP |
| | | | FYRGLCLTLWTGSEIKPVPLCWQSKRLTRD |
| | | | LALGNNHRNDAASAVTRADRLGRAASNV |
| | | | TKSDMVNITGLFEQADWNGRLQAPRQQLE |
| | | | AIAVVRDNPRLSEQERNLRMCGMIEHIRWL |
| | | | VTFSVKLQPQGPWCAYAEQHGLNTNPQY |
| | | | WPHADTNRDRKVHARLILPRLPGLRVLSV |
| | | | DLGHRYAAACAVWEAVNTETVKEACQNV |
| | | | GRDMPKEHDLYLHIKVKKQGIGKQTEVDK |
| | | | TTIYRRIGADTLPDGRPHPAPWARLDRQFLI |
| | | | KLQGEEKDAREASNEEIWALHQMECKLDR |
| | | | TKPLIDRLIASGWGLLKRQMARLDALKEL |
| | | | GWIPAPDSSENLSREDGEAKDYRESLAVDD |
| | | | LMFSAVRTLRLALQRHGNRARIAYYLISEV |
| | | | KIRPGGIQEKLDENGRIDLLQDALALWHEL |
| | | | FSSPGWRDEAAKQLWDSRIATLAGYKAPE |
| | | | ENGDNVSDVAYRKKQQVYREQLRNVAKT |
| | | | LSGDVITCKELSDAWKERWEDEDQRWKK |
| | | | LLRWFKDWVLPSGTQANNATIRNVGGLSL |
| | | | SRLATITEFRRKVQVGFFTRLRPDGTRHEIG |
| | | | EQFGQKTLDALELLREQRVKQLASRIAEAA |
| | | | LGIGSEGGKGWDGGKRPRQRINDSRFAPC |
| | | | HAVVIENLANYRPDETRTRLENRRLMTWS |
| | | | ASKVHKYLSEACQLNGLYLCTVSAWYTSR |
| | | | QDSRTGAPGIRCQDVSVREFMQSPFWRKQ |
| | | | VKQAEAKHDENKGDARERFLCELNKTWK |
| | | | AKTPAEWKKAGFVRIPLRGGEIFVSADSKS |
| | | | PSAKGIHADLNAAANIGLRALTDPDWPGK |
| | | | WWYVPCDPVSFESKMDYVKGCAAVKVG |
| | | | QPLRQPAQTNADGAASKIRKGKKNRTAGT |
| | | | SKEKVYLWRDISAFPLESNEIGEWKETSAY |
| | | | QNDVQYRVIRMLKEHIKSLDNRTGDNVEG |
| Dt | WP_0313 | Desulfonatronum | MVLGRKDDTAELRRALWTTHEHVNLAVA |
| (Desulfonatronum | 86437 | thiodismutans | EVERVLLRCRGRSYWTLDRRGDPVHVPES |
| thiodismutans) | | | QVAEDALAMAREAQRRNGWPVVGEDEEI |
| (SEQ ID NO: 525) | | | LLALRYLYEQIVPSCLLDDLGKPLKGDAQK |
| | | | IGTNYAGPLFDSDTCRRDEGKDVACCGPFH |
| | | | EVAGKYLGALPEWATPISKQEFDGKDASH |
| | | | LRFKATGGDDAFFRVSIEKANAWYEDPAN |
| | | | QDALKNKAYNKDDWKKEKDKGISSWAVK |
| | | | YIQKQLQLGQDPRTEVRRKLWLELGLLPLF |
| | | | IPVFDKTMVGNLWNRLAVRLALAHLLSWE |
| | | | SWNHRAVQDQALARAKRDELAALFLGME |
| | | | DGFAGLREYELRRNESIKQHAFEPVDRPYV |
| | | | VSGRALRSWTRVREEWLRHGDTQESRKNI |
| | | | CNRLQDRLRGKFGDPDVFHWLAEDGQEA |
| | | | LWKERDCVTSFSLLNDADGLLEKRKGYAL |
| | | | MTFADARLHPRWAMYEAPGGSNLRTYQIR |
| | | | KTENGLWADVVLLSPRNESAAVEEKTFNV |
| | | | RLAPSGQLSNVSFDQIQKGSKMVGRCRYQ |
| | | | SANQQFEGLLGGAEILFDRKRIANEQHGAT |
| | | | DLASKPGHVWFKLTLDVRPQAPQGWLDG |
| | | | KGRPALPPEAKHFKTALSNKSKFADQVRP |
| | | | GLRVLSVDLGVRSFAACSVFELVRGGPDQ |
| | | | GTYFPAADGRTVDDPEKLWAKHERSFKIT |
| | | | LPGENPSRKEEIARRAAMEELRSLNGDIRR |
| | | | LKAILRLSVLQEDDPRTEHLRLFMEAIVDD |
| | | | PAKSALNAELFKGFGDDRFRSTPDLWKQH |
| | | | CHFFHDKAEKVVAERFSRWRTETRPKSSS |
| | | | WQDWRERRGYAGGKSYWAVTYLEAVRG |
| | | | LILRWNMRGRTYGEVNRQDKKQFGTVAS |
| | | | ALLHHINQLKEDRIKTGADMIIQAARGFVP |
| | | | RKNGAGWVQVHEPCRLILFEDLARYRFRT |
| | | | DRSRRENSRLMRWSHREIVNEVGMQGELY |
| | | | GLHVDTTEAGFSSRYLASSGAPGVRCRHL |
| | | | VEEDFHDGLPGMHLVGELDWLLPKDKDR |
| | | | TANEARRLLGGMVRPGMLVPWDGGELFA |
| | | | TLNAASQLHVIHADINAAQNLQRRFWGRC |
| | | | GEAIRIVCNQLSVDGSTRYEMAKAPKARLL |
| | | | GALQQLKNGDAPFHLTSIPNSQKPENSYVM |
| | | | TPTNAGKKYRAGPGEKSSGEEDELALDIVE |
| | | | QAEELAQGRKTFFRDPSGVFFAPDRWLPSE |
| | | | IYWSRIRRRIWQVTLERNSSGRQERAEMDE |
| | | | MPY |
| Eb | OGS0232 | Elusimicrobia | MNRIYQGRVTKVEVPDGKDEKGNIKWKK |
| (Elusimicrobia | 6 | bacterium | LENWSDILWQHHMLFQDAVNYYTLALAAI |
| bacterium) | | | SGSAVGSDEKSIILREWAVQVQNIWEKAK |
| (SEQ ID NO: 526) | | | KKATVFEGPQKRLTSILGLEQNASFDIAAK |
| | | | HILRTSEAKPEQRASALIRLLEEIDKKNHNV |
| | | | VCGERLPFFCPRNIQSKRSPTSKAVSSVQEQ |
| | | | KRQEEVRRFHNMQPEEVVKNAVTLDISLF |
| | | | KSSPKIVFLEDPKKARAELLKQFDNACKKH |
| | | | KELVGIKKAFTESIDKHGSSLKVPAPGSKPS |
| | | | GLYPSAIVFKYFPVDITKTVFLKATEKLAM |
| | | | GKDREVTNDPIADARVNDKPHFDYFTNIAL |
| | | | IREKEKNRAAWFEFDLAAFIEAIMSPHRFY |
| | | | QDTQKRKEAARKLEEKIKAIEGKGGQFKES |
| | | | DSEDDDVDSLPGFEGDTRIDLLRKLVTDTL |
| | | | GWLGESETPDNNEGKKTEYSISERTLRIFPD |
| | | | IQKQWSELAEKGETTEGKLLEVLKHEQTE |
| | | | HQSDFGSATLYQHLAKPEFHPIWLKSGTEE |
| | | | WHAENPLKAWLNYKELQYELTDKKRPIHF |
| | | | TPAHPVYSPRYFDFPKKSETEEKEVSKNTH |
| | | | SLTTSLASEHIKNSLQFTAGLIRKTNVGKKA |
| | | | IKARFSYSAPRLRRDCLRSENNENLYKAPW |
| | | | LQPMMRALGIDEEKADRQNFANTRITLMA |
| | | | KGLDDIQLGFPVEANSQELQKEVSNGISWK |
| | | | GQFNWGGIASLSALRWPHEKKPKNPPEQP |
| | | | WWGIDSFSCLAVDLGQRYAGAFARLDVST |
| | | | IEKKGKSRFIGEACDKKWYAKVSRMGLLR |
| | | | LPGEDVKVWRDASKIDKENGFAFRKELFG |
| | | | EKGRSATPLEAEETAELIKLFGANEKDVMP |
| | | | DNWSKELSFPEQNDKLLIVARRAQAAVSR |
| | | | LHRWAWFFDEAKRSDDAIREILESDDTDLK |
| | | | QKVNKNEIEKVKETIISLLKVKQELLPTLLT |
| | | | RLANRVLPLRGRSWEWKKHHQKNDGFILD |
| | | | QTGKAMPNVLIRGQRGLSMDRIEQITELRK |
| | | | RFQALNQSLRRQIGKKAPAKRDDSIPDCCP |
| | | | DLLEKLDHMKEQRVNQTAHMILAEALGLK |
| | | | LAEPPKDKKELNETCDMHGAYAKVDNPVS |
| | | | FIVIEDLSRYRSSQGRSPRENSRLMKWCHR |
| | | | AVRDKLKEMCEVFFPLCERRKAGSAWVSL |
| | | | PPLLETPAAYSSRFCSRSGVAGFRAVEVIPG |
| | | | FELKYPWSWLKDKKDKAGNLAKEALNIRT |
| | | | VSEQLKAFNQDKPEKPRTLLVPIAGGPIFVP |
| | | | ISEVGLSSFGLKPQVVQADINAAINLGLRAI |
| | | | SDPRIWEIHPRLRTEKRDGRLFAREKRKYG |
| | | | EEKVEVQPSKNEKAKKVKDDRKPNYFADF |
| | | | SGKVDWGEGNIKNESGLTLVSGKALWWTI |
| | | | NQLQWERCFDINKRHIEDWSNKQKQ |
| Lb | | Lentisphaeria | MAVELNRIYQGRVNHVYIFDENQNQVSVD |
| (Lentisphaeria | | bacterium | NGDDLLFVHHELYQDAINYYLVALAAMA |
| bacterium) | | | LDSKDSLFGKFKMQIRAVWNDFYRNGQLR |
| (SEQ ID NO: 527) | | | PGLKHSLIRSLGHAAELNTSNGADIAMNLI |
| | | | LEDGGIPSEILNAALEHLAEKCTGDVSQLG |
| | | | KTFFPRFCDTAYHGNWDVDAKSFSEKKGR |
| | | | QRLVDALYSLHPVQAVQELAPEIEIGWGG |
| | | | VKTQTGKFFTGDEAKASLKKAISYFLQDTG |
| | | | KNSPELQEYFSVAGKQPLEQYLGKIDTFPEI |
| | | | SFGRISSHQNINISNAMWILKFFPDQYSVDL |
| | | | IKNLIPNKKYEIGIAPQWGDDPVKLSRGKR |
| | | | GYTFRAFTDLAMWEKNWKVFDRAAFSDA |
| | | | LKTINQFRNKTQERNDQLKRYCAALNWM |
| | | | DGESSDKKPPVEPADADAVDEAATSVLPIL |
| | | | AGDKRWNALLQLQKELGICNDFTENELMD |
| | | | YGLSLRTIRGYQKLRSMMLEKEEKMRAKT |
| | | | ADDEEISQALQEIIIKFQSSHRDTIGSVSLFL |
| | | | KLAEPKYFCVWHDADKNQNFASVDMVAD |
| | | | AVRYYSYQEEKARLEEPIQITPADARYSRR |
| | | | VSDLYALVYKNAKECKTGYGLRPDGNFVF |
| | | | EIAQKNAKGYAPAKVVLAFSAPRLKRDGLI |
| | | | DKEFSAYYPPVLQAFLREEEAPKQSFKTTA |
| | | | VILMPDWDKNGKRRILLNFPIKLDVSAIHQ |
| | | | KTDHRFENQFYFANNTNTCLLWPSYQYKK |
| | | | PVTWYQGKKPFDVVAVDLGQRSAGAVSRI |
| | | | TVSTEKREHSVAIGEAGGTQWYAYRKFSG |
| | | | LLRLPGEDATVIRDGQRTEELSGNAGRLST |
| | | | EEETVQACVLCKMLIGDATLLGGSDEKTIR |
| | | | SFPKQNDKLLIAFRRATGRMKQLQRWLW |
| | | | MLNENGLCDKAKTEISNSDWLVNKNIDNV |
| | | | LKEEKQHREMLPAILLQIADRVLPLRGRKW |
| | | | DWVLNPQSNSFVLQQTAHGSGDPHKKICG |
| | | | QRGLSFARIEQLESLRMRCQALNRILMRKT |
| | | | GEKPATLAEMRNNPIPDCCPDILMRLDAM |
| | | | KEQRINQTANLILAQALGLRHCLHSESATK |
| | | | RKENGMHGEYEKIPGVEPAAFVVLEDLSR |
| | | | YRFSQDRSSYENSRLMKWSHRKILEKLALL |
| | | | CEVFNVPILQVGAAYSSKFSANAIPGFRAE |
| | | | ECSIDQLSFYPWRELKDSREKALVEQIRKIG |
| | | | HRLLTFDAKATIIMPRNGGPVFIPFVPSDSK |
| | | | DTLIQADINASFNIGLRGVADATNLLCNNR |
| | | | VSCDRKKDCWQVKRSSNFSKMVYPEKLSL |
| | | | SFDPIKKQEGAGGNFFVLGCSERILTGTSEK |
| | | | SPVFTSSEMAKKYPNLMFGSALWRNEILKL |
| | | | ERCCKINQSRLDKFIAKKEVQNEL |
| Ls | WP_1063 | Laceyella | MSIRSFKLKIKTKSGVNAEELRRGLWRTHQ |
| (Laceyella | 41859 | sediminis | LINDGIAYYMNWLVLLRQEDLFIRNEETNE |
| sediminis) | | | IEKRSKEEIQGELLERVHKQQQRNQWSGEV |
| (SEQ ID NO: 528) | | | DDQTLLQTLRHLYEEIVPSVIGKSGNASLK |
| | | | ARFFLGPLVDPNNKTTKDVSKSGPTPKWK |
| | | | KMKDAGDPNWVQEYEKYMAERQTLVRLE |
| | | | EMGLIPLFPMYTDEVGDIHWLPQASGYTRT |
| | | | WDRDMFQQAIERLLSWESWNRRVRERRA |
| | | | QFEKKTHDFASRFSESDVQWMNKLREYEA |
| | | | QQEKSLEENAFAPNEPYALTKKALRGWER |
| | | | VYHSWMRLDSAASEEAYWQEVATCQTAM |
| | | | RGEFGDPAIYQFLAQKENHDIWRGYPERVI |
| | | | DFAELNHLQRELRRAKEDATFTLPDSVDHP |
| | | | LWVRYEAPGGTNIHGYDLVQDTKRNLTLI |
| | | | LDKFILPDENGSWHEVKKVPFSLAKSKQFH |
| | | | RQVWLQEEQKQKKREVVFYDYSTNLPHL |
| | | | GTLAGAKLQWDRNFLNKRTQQQIEETGEI |
| | | | GKVFFNISVDVRPAVEVKNGRLQNGLGKA |
| | | | LTVLTHPDGTKIVTGWKAEQLEKWVGESG |
| | | | RVSSLGLDSLSEGLRVMSIDLGQRTSATVS |
| | | | VFEITKEAPDNPYKFFYQLEGTELFAVHQR |
| | | | SFLLALPGENPPQKIKQMREIRWKERNRIK |
| | | | QQVDQLSAILRLHKKVNEDERIQAIDKLLQ |
| | | | KVASWQLNEEIATAWNQALSQLYSKAKEN |
| | | | DLQWNQAIKNAHHQLEPVVGKQISLWRK |
| | | | DLSTGRQGIAGLSLWSIEELEATKKLLTRW |
| | | | SKRSREPGVVKRIERFETFAKQIQHHINQVK |
| | | | ENRLKQLANLIVMTALGYKYDQEQKKWIE |
| | | | VYPACQVVLFENLRSYRFSYERSRRENKKL |
| | | | MEWSHRSIPKLVQMQGELFGLQVADVYA |
| | | | AYSSRYHGRTGAPGIRCHALTEADLRNETN |
| | | | IIHELIEAGFIKEEHRPYLQQGDLVPWSGGE |
| | | | LFATLQKPYDNPRILTLHADINAAQNIQKR |
| | | | FWHPSMWFRVNCESVMEGEIVTYVPKNKT |
| | | | VHKKQGKTFRFVKVEGSDVYEWAKWSKN |
| | | | RNKNTFSSITERKPPSSMILFRDPSGTFFKEQ |
| | | | EWVEQKTFWGKVQSMIQAYMKKTIVQRM |
| | | | EE |
| Mn | WP_0437 | Methylobacterium | MYEAIVLADDANAQLANAFLGPLTDPNSA |
| (Methylobacterium | 47912 | nodulans | GFLEAFNKVDRPAPSWLDQVPASDPIDPAV |
| nodulans) | | | LAEANAWLDTDAGRAWLVDTGAPPRWRS |
| (SEQ ID NO: 529) | | | LAAKQDPIWPREFARKLGELRKEAASGTSA |
| | | | IIKALKRDFGVLPLFQPSLAPRILGSRSSLTP |
| | | | WDRLAFRLAVGHLLSWESWCTRARDEHT |
| | | | ARVQRLEQFSSAHLKGDLATKVSTLREYE |
| | | | RARKEQIAQLGLPMGERDFLITVRMTRGW |
| | | | DDLREKWRRSGDKGQEALHAIIATEQTRK |
| | | | RGRFGDPDLFRWLARPENHHVWADGHAD |
| | | | AVGVLARVNAMERLVERSRDTALMTLPDP |
| | | | VAHPRSAQWEAEGGSNLRNYQLEAVGGE |
| | | | LQITLPLLKAADDGRCIDTPLSFSLAPSDQL |
| | | | QGVVLTKQDKQQKITYCTNMNEVFEAKLG |
| | | | SADLLLNWDHLRGRIRDRVDAGDIGSAFL |
| | | | KLALDVAHVLPDGVDDQLARAAFHFQSA |
| | | | KGAKSKHADSVQAGLRVLSIDLGVRSFAT |
| | | | CSVFELKDTAPTTGVAFPLAEFRLWAVHER |
| | | | SFTLELPGENVGAAGQQWRAQADAELRQL |
| | | | RGGLNRHRQLLRAATVQKGERDAYLTDLR |
| | | | EAWSAKELWPFEASLLSELERCSTVADPL |
| | | | WQDTCKRAARLYRTEFGAVVSEWRSRTRS |
| | | | REDRKYAGKSMWSVQHLTDVRRFLQSWS |
| | | | LAGRASGDIRRLDRERGGVFAKDLLDHIDA |
| | | | LKDDRLKTGADLIVQAARGFQRNEFGYWV |
| | | | QKHAPCHVILFEDLSRYRMRTDRPRRENSQ |
| | | | LMQWAHRGVPDMVGMQGEIYGIQDRRDP |
| | | | DSARKHARQPLAAFCLDTPAAFSSRYHAST |
| | | | MTPGIRCHPLRKREFEDQGFLELLKRENEG |
| | | | LDLNGYKPGDLVPLPGGEVFVCLNANGLS |
| | | | RIHADINAAQNLQRRFWTQHGDAFRLPCG |
| | | | KSAVQGQIRWAPLSMGKRQAGALGGFGY |
| | | | LEPTGHDSGSCQWRKTTEAEWRRLSGAQK |
| | | | DRDEAAAAEDEELQGLEEELLERSGERVVF |
| | | | FRDPSGVVLPTDLWFPSAAFWSIVRAKTVG |
| | | | RLRSHLDAQAEASYAVAAGL |
| Ob | WP_0095 | Omnitrophica | MNRIYQGRVTKVEKLKNGKSPDDREELKD |
| (Omnitrophica | 13281 | WOR_2 | WQTALWRHHELFQDAVSYYTLALAAMAE |
| bacterium) | | | GLPDKHPINVLRKRMEEAWEEFPRKTVTP |
| (SEQ ID NO: 530) | | | AKNLRDSVRPWLGLSESASFGDALKKILPP |
| | | | APENKEVRALAVALLAEKARTLKPQKTSA |
| | | | SYWGRFCDDLKKKPNWDYSEEELARKTGS |
| | | | GDWVAGLWSEDALNKIDELAKSLKLSSLV |
| | | | KCVPDGQINPEGARNLVKEALDHLEGVSN |
| | | | GTKKEKNDPGPAKKTNNWLRQHASDVRN |
| | | | FIHKNKNQFSSLPNGRLITERARGGGININK |
| | | | TYAGVLFKAFPCPFTFDYVRAAVPEPKVK |
| | | | KVDQEKKSEQSATWTELEKRILRIGDDPIEL |
| | | | ARKNNKPIFKAFTALEKWSDQNSKSCWSD |
| | | | FDKCAFEEALKTLNQFNQKTEEREKRRSEA |
| | | | EAELKYMMDENPEWKPKKETEGDDVREV |
| | | | PILKGDPRYEKLVKLFGDLDEEGSEHATGK |
| | | | IYGPSRASLRGFGKLRNEWVDLFTKANDN |
| | | | PREQDLQKAVTGFQREHKLDMGYTAFFLK |
| | | | LCERDYWDIWRDDTEVEVKKIREKRWVKS |
| | | | VVYAAADTRELAEELERLQEPVRYTPAEP |
| | | | QFSRRLFMFSDIKGKQGAKHIREGLVEVSL |
| | | | AVKDQSGKYGTCRVRLHYSAPRLIRDHLS |
| | | | DGSSSMWLQPMMAALGLSSDARGCFTRD |
| | | | SKGNVKEPAVALMSDFVGRKRELRMLLNF |
| | | | PVDLDISKLEENIGKKARWEKQMNTAYEK |
| | | | NKLKQRFHLIWPGMELKETQEPGQFWWD |
| | | | NPTIQKEGMYCLAIDLSQRRAADYALLHA |
| | | | GVNRDSKTFVELGQAGGQSWFTKLCAAGS |
| | | | LRLPGEDTEVIREGKRQIELSGKKGRNATQ |
| | | | SEYDQAIALAKQLLHNENSAELESAARDW |
| | | | LGDNAKRFSFPEQNDKLIDLYYGALSRYKT |
| | | | WLRWSWRLTEQHKELWDKTLDEIRKVPY |
| | | | FASWGELAGNGTNEATVQQLQKLIADAAV |
| | | | DLRNFLEKALLHIAYRALPLRENTWRWIEN |
| | | | GKDGKGKPLHLLVSDGQSPAEIPWLRGQR |
| | | | GLSIARIEQLENFRRAVLSLNRLLRHEIGTK |
| | | | PEFGSSTCGESLPDPCPDLTDKIVRLKEERV |
| | | | NQTAHLIIAQSLGVRLKGHSLFTEEREKAD |
| | | | MHGEHEVIPGRSPVDFVVLEDLSRYTTDKS |
| | | | RSRSENSRLMKWCHRKINEKVKLLAEPFGI |
| | | | PVIEVFASYSSKFDARTGAPGFRAVEVTSE |
| | | | DRPFWRKTIEKQSVAREVFDCLDNLVGKG |
| | | | LNGIHLVLPQNGGPLFIAAVKEDQPLPAIRQ |
| | | | ADINAAVNIGLRAIAGPSCYHAHPKVRLIK |
| | | | GESGTDKGKWLPRKGKEANKRENAQFGN |
| | | | VDLDLEVKFNRLDIDSDVLKGDNTNLFHD |
| | | | PLNIACYGFATIQNLQHPFLAHASAVFSRQ |
| | | | KGAVARLQWEVCRAINSRRLEAWQKKAE |
| | | | KAAVKR |
| Opb | WP_0095 | Opitutaceae | MSLNRIYQGRVAAVETGTALAKGNVEWM |
| (Opitutaceae | 13281 | bacterium | PAAGGDEVLWQHHELFQAAINYYLVALLA |
| bacterium) | | | LADKNNPVLGPLISQMDNPQSPYHVWGSF |
| (SEQ ID NO: 531) | | | RRQGRQRTGLSQAVAPYITPGNNAPTLDEV |
| | | | FRSILAGNPTDRATLDAALMQLLKACDGA |
| | | | GAIQQEGRSYWPKFCDPDSTANFAGDPAM |
| | | | LRREQHRLLLPQVLHDPAITHDSPALGSFD |
| | | | TYSIATPDTRTPQLTGPKARARLEQAITLW |
| | | | RVRLPESAADFDRLASSLKKIPDDDSRLNL |
| | | | QGYVGSSAKGEVQARLFALLLFRHLERSSF |
| | | | TLGLLRSATPPPKNAETPPPAGVPLPAASA |
| | | | ADPVRIARGKRSFVFRAFTSLPCWHGGDNI |
| | | | HPTWKSFDIAAFKYALTVINQIEEKTKERQ |
| | | | KECAELETDFDYMHGRLAKIPVKYTTGEA |
| | | | EPPPILANDLRIPLLRELLQNIKVDTALTDG |
| | | | EAVSYGLQRRTIRGFRELRRIWRGHAPAGT |
| | | | VFSSELKEKLAGELRQFQTDNSTTIGSVQLF |
| | | | NELIQNPKYWPIWQAPDVETARQWADAGF |
| | | | ADDPLAALVQEAELQEDIDALKAPVKLTP |
| | | | ADPEYSRRQYDFNAVSKFGAGSRSANRHE |
| | | | PGQTERGHNTFTTEIAARNAADGNRWRAT |
| | | | HVRIHYSAPRLLRDGLRRPDTDGNEALEAV |
| | | | PWLQPMMEALAPLPTLPQDLTGMPVFLMP |
| | | | DVTLSGERRILLNLPVTLEPAALVEQLGNA |
| | | | GRWQNQFFGSREDPFALRWPADGAVKTA |
| | | | KGKTHIPWHQDRDHFTVLGVDLGTRDAG |
| | | | ALALLNVTAQKPAKPVHRIIGEADGRTWY |
| | | | ASLADARMIRLPGEDARLFVRGKLVQEPY |
| | | | GERGRNASLLEWEDARNIILRLGQNPDELL |
| | | | GADPRRHSYPEINDKLLVALRRAQARLAR |
| | | | LQNRSWRLRDLAESDKALDEIHAERAGEK |
| | | | PSPLPPLARDDAIKSTDEALLSQRDIIRRSFV |
| | | | QIANLILPLRGRRWEWRPHVEVPDCHILAQ |
| | | | SDPGTDDTKRLVAGQRGISHERIEQIEELRR |
| | | | RCQSLNRALRHKPGERPVLGRPAKGEEIAD |
| | | | PCPALLEKINRLRDQRVDQTAHAILAAALG |
| | | | VRLRAPSKDRAERRHRDIHGEYERFRAPA |
| | | | DFVVIENLSRYLSSQDRARSENTRLMQWC |
| | | | HRQIVQKLRQLCETYGIPVLAVPAAYSSRF |
| | | | SSRDGSAGFRAVHLTPDHRHRMPWSRILA |
| | | | RLKAHEEDGKRLEKTVLDEARAVRGLFDR |
| | | | LDRFNAGHVPGKPWRTLLAPLPGGPVFVP |
| | | | LGDATPMQADLNAAINIALRGIAAPDRHDI |
| | | | HHRLRAENKKRILSLRLGTQREKARWPGG |
| | | | APAVTLSTPNNGASPEDSDALPERVSNLFV |
| | | | DIAGVANFERVTIEGVSQKFATGRGLWAS |
| | | | VKQRAWNRVARLNETVTDNNRNEEEDDIP |
| | | | M |
| Phyci | AQT6968 | Phycisphaerae | MATKSYRARILTDSRLAAALDRTHVVFVE |
| (Phycisphaerae | 5 | bacterium | SLKQMINTYLRMQNGKFGPDHKKLAQIML |
| bacterium) | | | SRSNTFAHGVMDQITRDQPTSTLDEEWTDL |
| (SEQ ID NO: 532) | | | ARRIHKTTGPLFLQAERFATVKNRAIHTKS |
| | | | RGKVIPSPETLAVPAKFWHQVCDSASAYIR |
| | | | SNRELMQQWRKDRAAWLKDKNEWQQKH |
| | | | PEFMQFYNGPYQNFLKLCDDDRITSQLAAE |
| | | | QQPTASKNNRPRKTGKRFARWHLWYKWL |
| | | | SENPEIIEWRNKASASDFKTVTDDVRKQIIT |
| | | | KYPQQNKYITRLLDWLEDNNPELKTLENL |
| | | | RRTYVKKFDSFKRPPTLTLPSPYRHPYWFT |
| | | | MELDQFYKKADFENGTIQLLLIDEDDDGN |
| | | | WFFNWMPASLKPDPRLVPSWRAETFETEG |
| | | | RFPPYLGGKIGKKLSRPAPTDAERKAGIAG |
| | | | AKLMIKNNRSELLFTVFEQDCPPRVKWAK |
| | | | TKNRKCPADNAFSSDGKTRKPLRILSIDLGI |
| | | | RHIGAFALTQGTRNDSAWQTESLKKGIINS |
| | | | PSIPPLRQVRRHDYDLKRKRRRHGKPVKG |
| | | | QRSNANLQAHRTNMAQDRFKKGASAIVSL |
| | | | AREHSADLILFENLHSLKFSAFDERWMNRQ |
| | | | LRDMNRRHIVELVSEQAPEFGITVKDDINP |
| | | | WMTSRICSNCNLPGFRFSMKKKNPYREKL |
| | | | PREKCTDFGYPVWEPGGHLFRCPHCDHRV |
| | | | NADINAAANLANKFFGLGYWNNGLKYDA |
| | | | ETKTFTVHTDKKTPPLIFKPRPQFDLWADS |
| | | | VKTRKQLGPDPF |
| Planc | OHB6217 | Planctomycetes | MSVRSFQARVECDKQTMEHLWRTHKVFN |
| (Planctomycetes | 5 | bacterium | ERLPEIIKILFKMKRGECGQNDKQKSLYKSI |
| bacterium) | | | SQSILEANAQNADYLLNSVSIKGWKPGTAK |
| (SEQ ID NO: 533) | | | KYRNASFTWADDAAKLSSQGIHVYDKKQ |
| | | | VLGDLPGMMSQMVCRQSVEAISGHIELTK |
| | | | KWEKEHNEWLKEKEKWESEDEHKKYLDL |
| | | | REKFEQFEQSIGGKITKRRGRWHLYLKWLS |
| | | | DNPDFAAWRGNKAVINPLSEKAQIRINKAK |
| | | | PNKKNSVERDEFFKANPEMKALDNLHGYY |
| | | | ERNFVRRRKTKKNPDGFDHKPTFTLPHPTI |
| | | | HPRWFVFNKPKTNPEGYRKLILPKKAGDL |
| | | | GSLEMRLLTGEKNKGNYPDDWISVKFKAD |
| | | | PRLSLIRPVKGRRVVRKGKEQGQTKETDSY |
| | | | EFFDKHLKKWRPAKLSGVKLIFPDKTPKAA |
| | | | YLYFTCDIPDEPLTETAKKIQWLETGDVTK |
| | | | KGKKRKKKVLPHGLVSCAVDLSMRRGTT |
| | | | GFATLCRYENGKIHILRSRNLWVGYKEGK |
| | | | GCHPYRWTEGPDLGHIAKHKREIRILRSKR |
| | | | GKPVKGEESHIDLQKHIDYMGEDRFKKAA |
| | | | RTIVNFALNTENAASKNGFYPRADVLLLEN |
| | | | LEGLIPDAEKERGINRALAGWNRRHLVER |
| | | | VIEMAKDAGFKRRVFEIPPYGTSQVCSKCG |
| | | | ALGRRYSIIRENNRREIRFGYVEKLFACPNC |
| | | | GYCANADHNASVNLNRRFLIEDSFKSYYD |
| | | | WKRLSEKKQKEEIETIESKLMDKLCAMHKI |
| | | | SRGSISK |
| Sb | OHD1600 | Spirochaetes | MSFTISYPFKLIIKNKDEAKALLDTHQYMN |
| (Spirochaetes | 8 | bacterium | EGVKYYLEKLLMFRQEKIFIGEDETGKRIYI |
| bacterium) | | | EETEYKKQIEEFYLIKKTELGRNLTLTLDEF |
| (SEQ ID NO: 534) | | | KTLMRELYICLVSSSMENKKGFPNAQQASL |
| | | | NIFSPLFDAESKGYILKEENNNISLIHKDYG |
| | | | KILLKRLRDNNLIPIFTKFTDIKKITAKLSPT |
| | | | ALDRMIFAQAIEKLLSYESWCKLMIKERFD |
| | | | KEVKIKELENKCENKQERDKIFEILEKYEEE |
| | | | RQKTFEQDSGFAKKGKFYITGRMLKGFDEI |
| | | | KEKWLKEKDRSEQNLINILNKYQTDNSKL |
| | | | VGDRNLFEFIIKLENQCLWNGDIDYLKIKR |
| | | | DINKNQIWLDRPEMPRFTMPDFKKHPLWY |
| | | | RYEDPSNSNFRNYKIEVVKDENYITIPLITE |
| | | | RNNEYFEENYTFNLAKLKKLSENITFIPKSK |
| | | | NKEFEFIDSNDEEEDKKDQKKSKQYIKYCD |
| | | | TAKNTSYGKSGGIRLYFNRNELENYKDGK |
| | | | KMDSYTVFTLSIRDYKSLFAKEKLQPQIFN |
| | | | TVDNKITSLKIQKKFGNEEQTNFLSYFTQN |
| | | | QITKKDWMDEKTFQNVKELNEGIRVLSVD |
| | | | LGQRFFAAVSCFEIMSEIDNNKLFFNLNDQ |
| | | | NHKIIRINDKNYYAKHIYSKTIKLSGEDDDL |
| | | | YKERKINKNYKLSYQERKNKIGIFTRQINK |
| | | | LNQLLKIIRNDEIDKEKFKELIETTKRYVKN |
| | | | TYNDGIIDWNNVDNKILSYENKEDVINLHK |
| | | | ELDKKLEIDFKEFIRECRKPIFRSGGLSMQRI |
| | | | DFLEKLNKLKRKWVARTQKSAESIVLTPKF |
| | | | GYKLKEHINELKDNRVKQGVNYILMTALG |
| | | | YIKDNEIKNDSKKKQKEDWVKKNRACQIIL |
| | | | MEKLTEYTFAEDRPREENSKLRMWSHRQI |
| | | | FNFLQQKASLWGILVGDVFAPYTSKCLSDN |
| | | | NAPGIRCHQVTKKDLIDNSWFLKIVVKDD |
| | | | AFCDLIEINKENVKNKSIKINDILPLRGGELF |
| | | | ASIKDGKLHIVQADINASRNIAKRFLSQINP |
| | | | FRVVLKKDKDETFHLKNEPNYLKNYYSIL |
| | | | NFVPTNEELTFFKVEENKDIKPTKRIKMDK |
| | | | HEKESTDEGDDYSKNQIALFRDDSGIFFDK |
| | | | SLWVDGKIFWSVVKNKMTKLLRERNNKK |
| | | | NGSK |
| Vb | | Verrucomicrobiaceae | MPLSRIYQGRTNSLIILTPTPQEPWDHKALA |
| (Verrucomicrobiaceae | | bacterium | RFDSPLWRHHALFQDAVNYYQLCLVALAS |
| bacterium) | | | SDGTRPLSKLHEQMKASWDEAKTDTEDS |
| (SEQ ID NO: 535) | | | WRVRLARRLGIPAASLFEAALAKVLEGNE |
| | | | APERARELAGELLLDKIEGDIQQAGRGYWP |
| | | | RFCDPKANPTYDYSATARASASGLTKLAA |
| | | | VIHAENVTEEALKQVAAEMDLSWTVKLQP |
| | | | DKNFVGAEARARLLEAAHHFIKVAESPPTK |
| | | | LAEVLARFPDGLALWQALPEKIAALPEETQ |
| | | | VPRNRKASPDLTFATLLFQHFPSLFTAAVL |
| | | | GLSVGKPKSVKAPKVVEKVSARRKANAVT |
| | | | QAVVIEEPEIDFAELGDDPIKLARGERGFVF |
| | | | PAFTSLSFWAVPGPHVPVWKEFDIAAFKEA |
| | | | LKTVNQFKLKTSERNALLAEAQRRLDYMD |
| | | | EKTHDWKTGDSDEPGHIPPRLKSDPNFTLI |
| | | | QALTQDEGVSNKATGDQHIPKGVYTGGLR |
| | | | GFYAIKKDWCELWERKADKSQGTPTEEELI |
| | | | SIVTDYQRDHVYDVGDVGLFRALCEPRFW |
| | | | PLWQPLTDEQEAERIKAGRAKDMISAYRV |
| | | | WLELQEDVVRLAQPIRFTPAHAENSRRLFM |
| | | | FSDISGSHGAEFGSDGKSLEVSIAYDVDGK |
| | | | LQPVRAKLEFSAPRAARDELEGLSGGSESM |
| | | | RWFQPMMKALDCPEVEMPALEKCAVSLM |
| | | | PDVVKKGGGKWVRLLLNFPATLEPEGLIR |
| | | | HIGKQAMWYKQFNGTYKPRTQQLDTGLH |
| | | | LYWPGLEKAPEAEDAAAWWNREEIRAKG |
| | | | FSVLSVDLGQRDAGAWALLESRSDKAFSR |
| | | | NRQPFIELGEAGGKLWSTALLGLGMLRLP |
| | | | GEDARTGALDDQGKRAVEFHGKAGRNAL |
| | | | EAEWQEAREMALLFGGEEAKSRLGPGFDH |
| | | | LSHSKQNEELLRILSRAQSRLARFHRWSCRI |
| | | | HEKPEATGDDVIDYGQVDELLTKTAEAML |
| | | | ENLKALYTNAGGILDSKSKQPLTLVGLRKK |
| | | | LEAQKVEPEKIAAVLKPHAEIIFQRLGTLIPE |
| | | | LKQHLRVSLERLANRELPLRHREWVWNEA |
| | | | FEKLEQGNFKKEENPKWIRGQRGLSMARIE |
| | | | QIENLRKRFMSLRRQMSLIPGEQVKQGVED |
| | | | KGQRQPEPCEDILNKLDRMKQQRVNQTAH |
| | | | LILAQALGLRLRPHLANDAEREEKDIHGEY |
| | | | ELIPGRKPVDFIVMEDLSRYLSSQGRAPSEN |
| | | | GRLMKWCHRAVLAKLKQMCEPFGIPVLEV |
| | | | PAAYSSRFCALTGVPGFRAVEVHDGNAED |
| | | | FRWKRLIKKAEKDKSSKDAEAAAMLFDQL |
| | | | HDLNIEAREARKQDKKLPLRTLFAPVAGGP |
| | | | LFIPMVGGGPRQADMNAAINLGLRAIASPT |
| | | | CLRARPKIRAELKDGKHQAMLGNKLEKAA |
| | | | ALTLEPPKEPTKELAAQKRTNFFLDEKFVG |
| | | | KFDTAHVTTSGKKLRLSGGMSLWKAIKDG |
| | | | AWQRVKKINDARIAKWKNNPPPEPDPDDE |
| | | | IQF |

[1619] Table 15 shows exemplary sequences of crRNA, tracrRNA, and sgRNA for Cas12b orthologs of Ls, Ak, Bv, Phyci, and Plane shown in Table 14. FIGS. 15A-15C show PAM discovery, in vitro cleavage with purified protein and RNA using Cas12b orthologs in Ls, Ak, and Bv, respectively. FIGS. 15D-15E show in vitro cleavage with purified protein and RNA using Cas12B orthologs of Phyci and Planc, respectively.

TABLE 15

| Name | crRNA | tracrRNA | sgRNA |
|---|---|---|---|
| Ls | UAGAUGAAU | UUUGCCUAAAGGGCAA | UUUGCCUAAAGGGC |
| | UAAAUGUGA | AGAAUACUGUGCGUGU | AAAGAAUACUGUGC |
| | UUAGCAC | GCUAAGGAUGGAAAA | GUGUGCUAAGGAUG |
| | (SEQ ID | AAUCCAUUCAACCACA | GAAAAAAUCCAUUC |
| | NO: 536) | GGAUUACAUUAUUUA | AACCACAGGAUUAC |
| | | UC | AUUAUUUAUCAAAA |
| | | (SEQ ID NO: 537) | GAUGAAUAAUGUGA |
| | | | UUAGCAC |
| | | | (SEQ ID |
| | | | NO: 538) |
| Ak | AGCGAGCG | GUCGUCUAUAGGACGG | GUCGUCUAUAGGAC |
| | GUCUGAGA | CGAGGACAACGGGAAG | GGCGAGGACAACGG |
| | AGUGGCAC | UGCCAAUGUGCUCUUU | GAAGUGCCAAUGUG |
| | U | CCAAGAGCAAACACCC | CUCUUUCCAAGAGC |
| | (SEQ ID | CGUUGGCUUCAAGAUG | AAACACCCCGUUGG |
| | NO: 539) | ACCGCUCGC | CUUCUCAGACCGCU |
| | | (SEQ ID | CGAAAACGAGCGGU |
| | | NO: 540) | CUGAGAAGUGGCAC |
| | | | U |
| | | | (SEQ ID |
| | | | NO: 541) |
| Bv | GCAGAAAU | GACCUAUAGGGUCAAU | GACCUAUAGGGUCA |
| | AAUGAUGA | GAAUCUGUGCGUGUGC | AUGAAUCUGUGCGU |
| | UUGGCAC | CAUAAGUAAUUAAAAA | GUGCCAUAAGUAAU |
| | (SEQ ID | UUACCCACCACAGGAU | UAAAAAUUACCCAC |
| | NO: 542) | UAUCUUAUUUCUGC | CACAGGAUUAUCUU |
| | | (SEQ ID NO: 543) | AUUUCUGCAAAAGC |
| | | | AGAAAUAAGAUGAU |
| | | | UGGCAC (SEQ ID |
| | | | NO:544) |
| Phyci | | | UCAGCCAACAUGCU |
| | | | CGCUUUGCGAAGGC |
| | | | UGACGGCCCGCUCU |
| | | | CAUUUGGCAUUGCC |
| | | | GGGAGCCGGAGUUU |
| | | | UCGGAAGAGAGUGU |
| | | | CGACGACUGCUGAU |
| | | | CUCCGCAUCCGCGU |
| | | | CCUGUUCGCCAGGC |
| | | | CGGGUCGGGUGUAC |
| | | | GGAUCAUGCUGGCA |
| | | | GCAGUCUACGCCGA |
| | | | GAACAUUCGCUACC |
| | | | GCGAAUGGACAC |
| | | | (SEQ ID |
| | | | NO: 545) |
| Planc | | | GUGGAGUAAGGUCG |
| | | | GAGUAACGACCGAA |
| | | | CGUUUAGCGUGCUA |
| | | | UAGGCCGCUGAAUG |
| | | | CCACACAGCGAUGU |
| | | | GUUUUGAGUGUCAA |
| | | | UAGCUGCUGACCCA |
| | | | AAGGCCAAAAGCCG |
| | | | AGUAGGGCUUGACU |
| | | | GAUGCGGUUUAUAU |
| | | | CGCACAUAGGCGGC |
| | | | AGUAACACAUAUCG |
| | | | CGUCAAUCAAAUUU |
| | | | AUUGAUGGACAC |
| | | | (SEQ ID |
| | | | NO: 546) |

### Example 7

[1620] Exemplary direct repeat sequences, crRNA sequences, tracrRNA sequences, and sgRNAs for Alicyclobacillus macrosporangiidus Cas12b are shown in Table 16 below.

TABLE 16
Am Cas12b direct repeat sequences

| | |
|---|---|
| 21nt | GGGCGAUCUGAGAAGUGGCAC |
| | (SEQ ID NO: 547) |
| 29nt | CGUUGAGCGGGCGAUCUGAGAAGUGGCAC |
| | (SEQ ID NO: 548) |
| Full-length | GUCGGAUCGUUGAGCGGGCGAUCUGAGAAGUG |
| | GCAC (SEQ ID NO: 549) |

crRNA

| | |
|---|---|
| nC1523 | CGATCTGAGAAGTGGCACGAGAAGTCATTTAA |
| (21 nt DR + | TAAGGCCAC (SEQ ID NO: 550) |
| 23nt guide) | |

tracr RNA

| | |
|---|---|
| nC1518 | CCGAUCUAUAGGACGGCAGAUUCAACGGGAUG |
| | (SEQ ID NO: 551) |
| nC1519 | CCGAUCUAUAGGACGGCAGAUUCAACGGGAUG |
| | UGCCAA (SEQ ID NO: 552) |
| nC1520 | CCGAUCUAUAGGACGGCAGAUUCAACGGGAUG |
| | UGCCAAUGCACUCUUUCCAGGAGUGAACA |
| | (SEQ ID NO: 553) |
| nC1521 | CCGAUCUAUAGGACGGCAGAUUCAACGGGAUG |
| | UGCCAAUGCACUCUUUCCAGGAGUGAACACCC |
| | CGUUGGCUUCAACAUGAUCGCCCGCUCAACGG |
| | U (SEQ ID NO: 554) |
| nC1522 | UGCCAAUGCACUCUUUCCAGGAGUGAACACCC |
| | CGUUGGCUUCAACAUGAUCGCCCGCUC |
| | (SEQ ID NO: 555) |

sgRNAs

| | |
|---|---|
| sgRNA 1 full | GCCGAUCUAUAGGACGGCAGAUUCAACGGGAUG |
| tracr-CTA | UGCCAAUGCACUCUUUCCAGGAGUGAACACCCC |
| loop-full DR | GUUGGCUUCAACAUGAUCGCCCGCUCAACGGUC |
| | CCUAGUCGGAUCGUUGAGCGGGCGAUCUGAGAA |
| | GUGGCAC |
| | (SEQ ID NO: 556) |
| sgRNA2 96nt | GCCGAUCUAUAGGACGGCAGAUUCAACGGGAUG |
| tracr-CTA | UGCCAAUGCACUCUUUCCAGGAGUGAACACCCC |
| loop-29nt DR | GUUGGCUUCAACAUGAUCGCCCGCUCAACGCUA |
| | CGUUGAGCGGGCGAUCUGAGAAGUGGCAC |
| | (SEQ ID NO: 557) |
| sgRNA3 88nt | GCCGAUCUAUAGGACGGCAGAUUCAACGGGAU |
| tracr-CTA | GUGCCAAUGCACUCUUUCCAGGAGUGAACACC |
| loop-21nt DR | CCGUUGGCUUCAACAUGAUCGCCCCUAGGGCG |
| | AUCUGAGAAGUGGCAC |
| | (SEQ ID NO: 558) |

[1621] FIG. 16 shows purified AmCas12b (AmC2C1) protein and in vitro cleavage assay with different predicted tracr RNAs from small RNAseq. We used a TTTA PAM since TTA is the consensus PAM for C2C1 at this point.

[1622] Various sgRNA designs are shown in FIGS. 17A-17E. FIG. 17A shows full-length AmC2C1 direct repeat sequence (green) annealed to tracr RNA (red). Tracr was predicted by small RNAseq and confirmed in vitro. Blue circle=5′ end; red circle=3′ end. FIG. 17B shows 21 nt of AmC2C1 direct repeat sequence (green) annealed to tracr RNA (red). Tracr was predicted by small RNAseq and confirmed in vitro. Blue circle=5′ end; red circle=3′ end. FIG. 17C shows fusion of full length direct repeat and tracr with CTA loop. FIG. 17D shows 29 nt of direct repeat and tracr with CTA loop. FIG. 17E shows 21 nt of direct repeat and tracr with CTA loop.

[1623] FIG. 18 shows in vitro cleavage with AmC2C1 for comparison of sgRNA efficiencies.

[1624] Mutants of AmC2C1 RuvC were generated and their activities were tested using HEK cell lysates (FIG. 19).

[1625] PAMs for Cas12b orthologs was determined by an in vitro PAM screen. In brief, Cas12b proteins and sgRNA were incubated with a PAM library plasmid. The results were shown in FIG. 20.

### Example 8

[1626] Bacillus hisashii Cas12b (BhC2C1) was purified and its activity was tested at different temperatures. FIGS. 21A-21D show small RNAseq tracr prediction, BhC2C1 (Bacillus hisashii Cas12b) PAM from in vivo screen, BhC2C1 protein purification, in vitro cleavage with BhC2C1 protein and predicted tracr RNAs at 37° C. and 48° C., respectively.

[1627] FIGS. 22A-22D show BhC2C1 sgRNA designs. For example, FIG. 22A shows 20 nt direct repeat (green) and predicted tracr RNA (red).

[1628] Direct repeat sequences, tracr RNA sequences, and sgRNA sequences of BhC2C1 are shown in Table 17 below.

TABLE 17
BhC2C1 direct repeat sequences

| | |
|---|---|
| 20 nt | AUGAUACGAGGCAUU |
| | AGCAC |
| | (SEQ ID NO: 559) |
| full | GUCCAAGAAAAAAGAAAUG |
| length | AUACGAGGCAUUAGCAC |
| | (SEQ ID |
| | NO: 560) |

tracr RNA

| | |
|---|---|
| JS1568 | ACGAGGUUCUGUCUUUUGGU |
| | CAGGACAACCGUCUAGCUAU |
| | AAGUGCUGCAGGGUGUGAGA |
| | AACUCCUAUUGCUGGACGAU |
| | GUCUCUUUU |
| | (SEQ ID NO: 561) |

sgRNAs

| | |
|---|---|
| sgRNA 1 | GAGGUUCUGUCUUUUGGUCA |
| | GGACAACCGUCUAGCUAUAA |
| | UGGCUGCAGGGUGUGAGAAA |
| | CUCCUAUUGCUGGACGAUGU |
| | CUCUACGAGGCAUUAGCAC |
| | (SEQ ID NO: 562) |
| sgRNA2 | ACGAGGUUCUGUCUUUUGGU |
| | CAGGACAACCGUCUAGCUAU |
| | AAGUGCUGCAGGGUGUGAGA |
| | AACUCCUAUUGCUGGACGAU |
| | GUCUCUAUGAUACGAGGCAU |
| | UAGCAC |
| | (SEQ ID NO: 563) |
| sgRNA3 | ACGAGGUUCUGUCUUUUGGU |
| | CAGGACAACCGUCUAGCUAU |
| | AAGUGCUGCAGGGUGUGAGA |
| | AACUCCUAUUGCUGGACGAU |
| | GUCUCUUACGAGGCAUUAGC |
| | AC (SEQ ID NO: 564) |

[1629] BhC2C1 was cloned into a plasmid. A map of the plasmid is shown in FIG. 23. The scaffold was

(SEQ ID NO: 565)
GTTCTGTCTTTTGGTCAGGACAACCGTCTAGCTATAAGTGCTG
CAGGGTGTGAGAAACTCCTATTGCTGGACGACGCCTCTTACGA
GGCGTTAGCACn23_spacer.

### Example 9

[1630] FIG. 24 shows indel percentage obtained with the different sgRNAs after plasmid transfection, for different target sites. Cas12b used was from Bacillus sp. V3-13 (WP_101661451). The protein sequence, sgRNA sequences, and targeted sites are shown in Table 18 below.

TABLE 18
BvCas12b protien sequence

| | |
|---|---|
| NLS-BvCas12b- | MAPKKKRKVGIHGVPAAAIRSIKLKM |
| NLS-3xHA | KTNSGTDSIYLRKALWRTHQLINEGI |
| (BvCas12b | AYYMNLLTLYRQEAIGDKTKEAYQAE |
| underlined)) | LINIIRNQQRNNGSSEEHGSDQEILA |
| (SEQ ID | LLRQLYELIIPSSIGESGDANQLGNK |
| NO: 566) | FLYPLVDPNSQSGKGTSNAGRKPRWK |
| | RLKEEGNPDWELEKKKDEERKAKDPT |
| | VKIFDNLNKYGLLPLFPLFTNIQKDI |
| | EWLPLGKRQSVRKWDKDMFIQAIERL |
| | LSWESWNRRVADEYKQLKEKTESYYK |
| | EHLTGGEEWIEKIRKFEKERNMELEK |
| | NAFAPNDGYFITSRQIRGWDRVYEKW |
| | SKLPESASPEELWKVVAEQQNKMSEG |
| | FGDPKVFSFLANRENRDIWRGHSERI |
| | YHIAAYNGLQKKLSRTKEQATFTLPD |
| | AIEHPLWIRYESPGGTNLNLFKLEEK |
| | QKKNYYVTLSKIIWPSEEKWIEKENI |
| | EIPLAPSIQFNRQIKLKQHVKGKQEI |
| | SFSDYSSRISLDGVLGGSRIQFNRKY |
| | IKNHKELLGEGDIGPVFFNLVVDVAP |
| | LQETRNGRLQSPIGKALKVISSDFSK |
| | VIDYKPKELMDWMNTGSASNSFGVAS |
| | LLEGMRVMSIDMGQRTSASVSIFEVV |
| | KELPKDQEQKLFYSINDTELFAIHKR |
| | SFLLNLPGEVVTKNNKQQRQERRKKR |
| | QFVRSQIRMLANVLRLETKKTPDERK |
| | KAIHKLMEIVQSYDSWTASQKEVWEK |
| | ELNLLTNMAAFNDEIWKESLVELHHR |
| | IEPYVGQIVSKWRKGLSEGRKNLAGI |
| | SMWNIDELEDTRRLLISWSKRSRTPG |
| | EANRIETDEPFGSSLLQHIQNVKDDR |
| | LKQMANLIIMTALGFKYDKEEKDRYK |
| | RWKETYPACQIILFENLNRYLFNLDR |
| | SRRENSRLMKWAHRSIPRTVSMQGEM |
| | FGLQVGDVRSEYSSRFHAKTGAPGIR |
| | CHALTEEDLKAGSNTLKRLIEDGFIN |
| | ESELAYLKKGDIIPSQGGELFVTLSK |
| | RYKKDSDNNELTVIHADINAAQNLQK |
| | RFWQQNSEVYRVPCQLARMGEDKLYI |
| | PKSQTETIKKYFGKGSFVKNNTEQEV |
| | YKWEKSEKMKIKTDTTFDLQDLDGFE |
| | DISKTIELAQEQQKKYLTMFRDPSGY |
| | FFNNETWRPQKEYWSIVNNIIKSCLK |
| | KKILSNKVELKRPAATKKAGQAKKKK |
| | GSYPYDVPDYAYPYDVPDYAYPYDVP |
| | DYA* |

sgRNA sequences

| | |
|---|---|
| sgRNA. 1 | GACCUAUAGGGUCAAUGAAUCUGUGCGU |
| (SEQ ID | GUGCCAUAAGUAAUUAAAAAUUACCCAC |
| NO: 567) | CACAGGAUUAUCUUAUUUCUGCAAAAGC |
| | AGAAAUAAGAUGAUUGGCAC- |
| | nnnnnnnnnnnnnnnnnnnnnnn |
| | (23 nt spacer) |
| sgRNA.2 | GGUGACCUAUAGGGUCAAUGAAUCUGUG |
| (SEQ ID | CGUGUGCCAUAAGUAAUUAAAAAUUACC |
| NO: 568) | CACCACAGGAUUAUCUUAUUUCUGCAAA |
| | AGCAGAAAUAAGAUGAUUGGCAC- |
| | nnnnnnnnnnnnnnnnnnnnnnn |
| | (23 nt spacer) |
| sgRNA.3 | CUAUAGGGUCAAUGAAUCUGUGCGUGUG |
| (SEQ ID | CCAUAAGUAAUUAAAAAUUACCCACCAC |
| NO: 569) | AGGAUUAUCUUAUUUCUGCAAAAGCAGA |
| | AAUAAGAUGAUUGGCAC- |
| | nnnnnnnnnnnnnnnnnnnnnnn |
| | (23 nt spacer) |
| sgRNA.4 | GACCUAUAGGGUCAAUGAAUCUGUGCGU |
| (SEQ ID | GUGCCAUAAGUAAUUAAAAAUUACCCAC |
| NO: 570) | CACAGGAUCAUCUUAAAAAAGAUGAUUG |
| | GCAC-nnnnnnnnnnnnnnnnnnnnnnn |
| | (23 nt spacer) |
| sgRNA.5 | GACCUAUAGGGUCAAUGAAUCUGUGCGUG |
| (SEQ ID | UGCCAUAAGUAAUUAAAAAUUACCCACCA |
| NO: 571) | CAGGAUCAUCUUAUUUCAAAAGAAAUAAG |
| | AUGAUUGGCAC-nnnnnnnnnnnnnnnn |
| | nnnnnnn (23 nt spacer) |
| sgRNA.6 | GACCUAUAGGGUCAAUGAAUCUGUGCGUG |
| (SEQ ID | UGCCAUAAGUAAUUAAAAAUUACCCACCA |
| NO: 572) | CAGGAGCACCUGAAAACAGGUGCUUGGCA |
| | C-nnnnnnnnnnnnnnnnnnnnnnn |
| | (23 nt spacer) |

Target sites

| | |
|---|---|
| DNMT1-1: | CCCTTCAGCTAAAATAAAGGAGG |
| (SEQ ID | |
| NO: 573) | |
| DNMT1-2: | GGCTCAGCAGGCACCTGCCTCAG |
| (SEQ ID | |
| NO: 574) | |
| DNMT1-3: | ACGTACTGATGTTAACAGCTGAC |
| (SEQ ID | |
| NO: 575) | |
| VEGFA-1: | GGGACTGGAGTTGCTTCATGTAC |
| (SEQ ID | |
| NO: 576) | |
| VEGFA-2: | CTGACCTCCCAAACAGCTACATA |
| (SEQ ID | |
| NO: 577) | |
| EMX1-1: | TTCATGGAGAAAATATTCAGAAT |
| (SEQ ID | |
| NO: 578) | |
| EMX1-2: | TCTCCATGAAAAATACTGGGGTC |
| (SEQ ID | |
| NO: 579) | |

### Example 10

[1631] BvCas12b (Bacillus sp. V3-13 Cas12b) was cloned into a plasmid (pcDNA3-BvCas12b). A map of the plasmid is shown in FIG. 25. The sequence of the cloned construct is shown in Table 19 below.

TABLE 19
Sequence of pcDNA3-BvCas12b

AGAACATGTGAGCAAAAGGCCAGCAAAAGGCCAGGAACCGTAAAAAGGCCGC
GTTGCTGGCGTTTTTCCATAGGCTCCGCCCCCCTGACGAGCATCACAAAAATCG
ACGCTCAAGTCAGAGGTGGCGAAACCCGACAGGACTATAAAGATACCAGGCG
TTTCCCCCTGGAAGCTCCCTCGTGCGCTCTCCTGTTCCGACCCTGCCGCTTACC
GGATACCTGTCCGCCTTTCTCCCTTCGGGAAGCGTGGCGCTTTCTCATAGCTCA
CGCTGTAGGTATCTCAGTTCGGTGTAGGTCGTTCGCTCCAAGCTGGGCTGTGTG
CACGAACCCCCCGTTCAGCCCGACCGCTGCGCCTTATCCGGTAACTATCGTCTT
GAGTCCAACCCGGTAAGACACGACTTATCGCCACTGGCAGCAGCCACTGGTAA
CAGGATTAGCAGAGCGAGGTATGTAGGCGGTGCTACAGAGTTCTTGAAGTGGT
GGCCTAACTACGGCTACACTAGAAGAACAGTATTTGGTATCTGCGCTCTGCTG
AAGCCAGTTACCTTCGGAAAAAGAGTTGGTAGCTCTTGATCCGGCAAACAAAC
CACCGCTGGTAGCGGTGGTTTTTTTGTTTGCAAGCAGCAGATTACGCGCAGAA
AAAAAGGATCTCAAGAAGATCCTTTGATCTTTTCTACGGGGTCTGACGCTCAGT
GGAACGAAAACTCACGTTAAGGGATTTTGGTCATGAGATTATCAAAAAGGATC
TTCACCTAGATCCTTTTAAATTAAAAATGAAGTTTTAAATCAATCTAAAGTATA
TATGAGTAAACTTGGTCTGACAGTTACCAATGCTTAATCAGTGAGGCACCTATC
TCAGCGATCTGTCTATTTCGTTCATCCATAGTTGCCTGACTCCCCGTCGTGTAG
ATAACTACGATACGGGAGGGCTTACCATCTGGCCCCAGTGCTGCAATGATACC
GCGAGACCCACGCTCACCGGCTCCAGATTTATCAGCAATAAACCAGCCAGCCG
GAAGGGCCGAGCGCAGAAGTGGTCCTGCAACTTTATCCGCCTCCATCCAGTCT
ATTAATTGTTGCCGGGAAGCTAGAGTAAGTAGTTCGCCAGTTAATAGTTTGCG
CAACGTTGTTGCCATTGCTACAGGCATCGTGGTGTCACGCTCGTCGTTTGGTAT
GGCTTCATTCAGCTCCGGTTCCCAACGATCAAGGCGAGTTACATGATCCCCCAT
GTTGTGCAAAAAAGCGGTTAGCTCCTTCGGTCCTCCGATCGTTGTCAGAAGTA
AGTTGGCCGCAGTGTTATCACTCATGGTTATGGCAGCACTGCATAATTCTCTTA
CTGTCATGCCATCCGTAAGATGCTTTTCTGTGACTGGTGAGTACTCAACCAAGT
CATTCTGAGAATAGTGTATGCGGCGACCGAGTTGCTCTTGCCCGGCGTCAATA
CGGGATAATACCGCGCCACATAGCAGAACTTTAAAAGTGCTCATCATTGGAAA
ACGTTCTTCGGGGCGAAAACTCTCAAGGATCTTACCGCTGTTGAGATCCAGTTC
GATGTAACCCACTCGTGCACCCAACTGATCTTCAGCATCTTTTACTTTCACCAG
CGTTTCTGGGTGAGCAAAAACAGGAAGGCAAAATGCCGCAAAAAAGGGAATA
AGGGCGACACGGAAATGTTGAATACTCATACTCTTCCTTTTTCAATATTATTGA
AGCATTTATCAGGGTTATTGTCTCATGAGCGGATACATATTTGAATGTATTTAG
AAAAATAAACAAATAGGGGTTCCGCGCACATTTCCCCGAAAAGTGCCACCTGA
CGTCGACGGATCGGGAGATCTCCCGATCCCCTATGGTGCACTCTCAGTACAAT
CTGCTCTGATGCCGCATAGTTAAGCCAGTATCTGCTCCCTGCTTGTGTGTTGGA
GGTCGCTGAGTAGTGCGCGAGCAAAATTTAAGCTACAACAAGGCAAGGCTTGA
CCGACAATTGCATGAAGAATCTGCTTAGGGTTAGGCGTTTTGCGCTGCTTCGCG
ATGTACGGGCCAGATATACGCGTTGACATTGATTATTGACTAGTTATTAATAGT
AATCAATTACGGGGTCATTAGTTCATAGCCCATATATGGAGTTCCGCGTTACAT
AACTTACGGTAAATGGCCCGCCTGGCTGACCGCCCAACGACCCCCGCCCATTG
ACGTCAATAATGACGTATGTTCCCATAGTAACGCCAATAGGGACTTTCCATTG
ACGTCAATGGGTGGAGTATTTACGGTAAACTGCCCACTTGGCAGTACATCAAG
TGTATCATATGCCAAGTACGCCCCCTATTGACGTCAATGACGGTAAATGGCCC
GCCTGGCATTATGCCCAGTACATGACCTTATGGGACTTTCCTACTTGGCAGTAC
ATCTACGTATTAGTCATCGCTATTACCATGGTGATGCGGTTTTGGCAGTACATC
AATGGGCGTGGATAGCGGTTTGACTCACGGGGATTTCCAAGTCTCCACCCCAT
TGACGTCAATGGGAGTTTGTTTTGGCACCAAAATCAACGGGACTTTCCAAAAT
GTCGTAACAACTCCGCCCCATTGACGCAAATGGGCGGTAGGCGTGTACGGTGG
GAGGTCTATATAAGCAGAGCTCTCTGGCTAACTAGAGAACCCACTGCTTACTG
GCTTATCGAAATTAATACGACTCACTATAGGGAGACCCAAGCTGGCTAGCGTT
TAAACTTAAGCTTGCCACCATGGCCCCAAAGAAGAAGCGGAAGGTCGGTATCC
ACGGAGTCCCAGCAGCCGGATCCgccgtgaagtccatcaaagtgaagctgcggctgagcgagtgccccga
tattctggctggaatgtggcagctgcacagagccacaaatgccggcgtgcggtactacacagaatgggtgtccctgat
gcggcaagagatcctgtacagcagaggccctgatggcggccagcagtgttatatgaccgccgaggattgccagagaga
gctgctgcggagactgcggaatagacagctgcataacggccggcaggatcagcctggaacagatgctgatctgctggc
catcagcagacggctgtacgagattctggtgctgcagagcatcggcaaaagaggcgacgcccagcagattgccagcag
ctttctgagccctctggtggaccccaacagcaaaggtggaagaggcgaggccaagagcggaagaaaacctgcctggca
gaagatgcgcgaccagggcgatcctagatgggttgccgctagagagaagtacgagcagcggaaggccgtggatcccag
caaagagattctgaacagcctggacgccctgggcctcagacctctgtttgccgtgttcaccgagacatacagatccgg
cgtggactggaagcctctgggcaaatctcagggcgtcagaacctgggacagagacatgtttcagcaggccctggaacg
gctgatgagctgggagagctggaatcggagagtgggcgaagagtacgccagactgttccagcagaaaatgaagttcga
gcaagagcacttcgccgagcagagccacctggtcaaactggctagagccctggaagccgatatgagagccgcctctca
gggcttcgaggccaaaagaggaacagcccaccagatcaccagaagggcactgagaggggccgacagagtgttcgagat
ctggaagtctatccccgaggaagccctgttcagccagtacgacgaagtgatcagacaggtgcaggccgagaagcggag
agatttcggcagccatgacctgttcgccaagctggccgagcctaagtatcagcccctttggagagccgacgagacatt
cctgaccagatacgccctgtacaacggcgtgctgcgcgatctggaaaaggccagacagttcgccaccttcacactgcc
tgatgcctgcgtgaaccccatctggaccagattcgagtctagccagggcagcaacctgcacaaatacgagtttctgtt
cgaccacctcggacctggcagacacgccgtcagatttcagagactgctggtggtggaaagcgagggcgccaaagaaag
ggatagcgtggtggtgcctgtggctccttctggccaactggataagctggtgctgagggaagaagagaagtccagcgt
cgccctgcatctgcacgataccgctagacccgatggcttcatggctgaatgggctggcgccaaactgcagtacgagag
aagcaccctggccagaaaagccagacgggacaagcagggcatgagaagctggcggagacagccctccatgctgatgtc
tgccgctcagatgctggaagatgccaaacaggctggcgacgtgtacctgaacatcagcgtgcgcgtgaagtctcccag
tgaagtgcgaggacagaggcggcctccttacgccgctctgtttagaatcgacgacaagcagcggagagtgaccgtgaa
ctacaacaagctgagcgcctacctggaagaacaccccgataagcagatccctggcgctcctggactgctgtctggact
gagagtgatgtccgtggacctgggcctgagaacaagcgccagcatctccgtgttcagagtggccaagaaagaagaggt
ggaagccctcggagatggccggcctcctcactactatcctatccacggcaccgatgacctggtggccgtgcacgaaag
atcccacctgattcagatgcccggcgaaaccgagacaaagcagctgcggaagctgagagaagaacggcaggccgtgct
gaggccactgtttgctcaactggcactgctgagactgctcgtcagatgtggcgccgctgacgagagaatcagaaccag
atcctggcagcggctgaccaagcagggaagagagttcaccaagagactgacccctagctggcgcgaggctctggaact
ggaactgacaagactcgaggcctactgcggcagagtgcccgatgatgagtggtccagaatcgtggacagaaccgtgat
tgccctgtggcggagaatgggcaagcaagtgcgcgattggcggaagcaagtgaagtccggggccaaagtgaaagtgaa
gggctaccagctggatgtcgtcggcggaaattctctggcccagatcgactatctggaacagcagtacaagttcctgcg
gcgttggagcttcttcgccagagcttctggcctggtcgtgcgggccgatagagaaagccattttgccgtggctctgag
acagcacatcgagaacgccaagcgggacagactgaagaaactggccgaccggatcctgatggaagcactgggctatgt
gtacgaggccagcggacctagagaaggccagtggacagctcagcaccctccttgccagctgatcattctcgaggaact
gtccgcctaccggttcagcgacgatagacctcctagcgagaacagcaaactgatggcctggggccacagaggcatcct
cgaagaactggtcaaccaggctcaggtgcacgatgtgctcgtgggcacagtgtacgccgccttcagcagcagattcga
cgctagaacaggtgctcccggcgtcagatgcagaagagtgcctgccagatttgtgggcgccaccgtggatgattctct
gccactgtggctgaccgagttcctggacaagcaccggctggataagaacctgctgcggcccgacgatgtgatcccaac
aggcgaaggcgaattcctggtgtccccttgtggcgaagaggctgccagagttagacaggttcacgccgacatcaacgc
tgcccagaacctgcagagaaggctgtggcagaacttcgacatcaccgagctgaggctgagatgcgacgtgaagatggg
cggagagggaacagtgctggtgcccagagtgaacaacgccagagccaagcagctgttcggcaagaaggtgctggtttc
ccaggacggcgtgaccttcttcgagagatctcagacaggcggcaagccccacagcgagaagcagaccgatctgaccga
caaagaactcgagctgatcgccgaggccgatgaggccagagctaaaagcgtggtgctgttcagggatcctagcggcca
cattggcaaaggccactggatccggcagcgcgagttttggagtctggtcaagcagaggatcgagagccacaccgccga
gcggattagagttagaggcgtgggaagctccaggacGGATCCAAAAGGCCGGCGGCCACGAAAAAG
GCCGGCCAGGCAAAAAAGAAAAAGggatctTACCCATACGATGTTCCAGATTACG
CTTATCCCTACGACGTGCCTGATTATGCATACCCATATGATGTCCCCGACTATG
CCtaaGAATTCTGCAGATATCCAGCACAGTGGCGGCCGCTCGAGTCTAGAGGGC
CCGTTTAAACCCGCTGATCAGCCTCGACTGTGCCTTCTAGTTGCCAGCCATCTG
TTGTTTGCCCCTCCCCCGTGCCTTCCTTGACCCTGGAAGGTGCCACTCCCACTG
TCCTTTCCTAATAAAATGAGGAAATTGCATCGCATTGTCTGAGTAGGTGTCATT
CTATTCTGGGGGGTGGGGTGGGGCAGGACAGCAAGGGGGAGGATTGGGAAGA
CAATAGCAGGCATGCTGGGGATGCGGTGGGCTCTATGGCTTCTGAGGCGGAAA
GAACCAGCTGGGGCTCTAGGGGGTATCCCCACGCGCCCTGTAGCGGCGCATTA
AGCGCGGCGGGTGTGGTGGTTACGCGCAGCGTGACCGCTACACTTGCCAGCGC
CCTAGCGCCCGCTCCTTTCGCTTTCTTCCCTTCCTTTCTCGCCACGTTCGCCGGC
TTTCCCCGTCAAGCTCTAAATCGGGGGCTCCCTTTAGGGTTCCGATTTAGTGCT
TTACGGCACCTCGACCCCAAAAAACTTGATTAGGGTGATGGTTCACGTAGTGG
GCCATCGCCCTGATAGACGGTTTTTCGCCCTTTGACGTTGGAGTCCACGTTCTT
TAATAGTGGACTCTTGTTCCAAACTGGAACAACACTCAACCCTATCTCGGTCTA
TTCTTTTGATTTATAAGGGATTTTGCCGATTTCGGCCTATTGGTTAAAAAATGA
GCTGATTTAACAAAAATTTAACGCGAATTAATTCTGTGGAATGTGTGTCAGTTA
GGGTGTGGAAAGTCCCCAGGCTCCCCAGCAGGCAGAAGTATGCAAAGCATGC
ATCTCAATTAGTCAGCAACCAGGTGTGGAAAGTCCCCAGGCTCCCCAGCAGGC
AGAAGTATGCAAAGCATGCATCTCAATTAGTCAGCAACCATAGTCCCGCCCCT
AACTCCGCCCATCCCGCCCCTAACTCCGCCCAGTTCCGCCCATTCTCCGCCCCA
TGGCTGACTAATTTTTTTTATTTATGCAGAGGCCGAGGCCGCCTCTGCCTCTGA
GCTATTCCAGAAGTAGTGAGGAGGCTTTTTTGGAGGCCTAGGCTTTTGCAAAA
AGCTCCCGGGAGCTTGTATATCCATTTTCGGATCTGATCAAGAGACAGGATGA
GGATCGTTTCGCATGATTGAACAAGATGGATTGCACGCAGGTTCTCCGGCCGC
TTGGGTGGAGAGGCTATTCGGCTATGACTGGGCACAACAGACAATCGGCTGCT
CTGATGCCGCCGTGTTCCGGCTGTCAGCGCAGGGGCGCCCGGTTCTTTTTGTCA
AGACCGACCTGTCCGGTGCCCTGAATGAACTGCAGGACGAGGCAGCGCGGCTA
TCGTGGCTGGCCACGACGGGCGTTCCTTGCGCAGCTGTGCTCGACGTTGTCACT
GAAGCGGGAAGGGACTGGCTGCTATTGGGCGAAGTGCCGGGGCAGGATCTCC
TGTCATCTCACCTTGCTCCTGCCGAGAAAGTATCCATCATGGCTGATGCAATGC
GGCGGCTGCATACGCTTGATCCGGCTACCTGCCCATTCGACCACCAAGCGAAA
CATCGCATCGAGCGAGCACGTACTCGGATGGAAGCCGGTCTTGTCGATCAGGA
TGATCTGGACGAAGAGCATCAGGGGCTCGCGCCAGCCGAACTGTTCGCCAGGC
TCAAGGCGCGCATGCCCGACGGCGAGGATCTCGTCGTGACCCATGGCGATGCC
TGCTTGCCGAATATCATGGTGGAAAATGGCCGCTTTTCTGGATTCATCGACTGT
GGCCGGCTGGGTGTGGCGGACCGCTATCAGGACATAGCGTTGGCTACCCGTGA
TATTGCTGAAGAGCTTGGCGGCGAATGGGCTGACCGCTTCCTCGTGCTTTACGG
TATCGCCGCTCCCGATTCGCAGCGCATCGCCTTCTATCGCCTTCTTGACGAGTT
CTTCTGAGCGGGACTCTGGGGTTCGAAATGACCGACCAAGCGACGCCCAACCT
GCCATCACGAGATTTCGATTCCACCGCCGCCTTCTATGAAAGGTTGGGCTTCGG
AATCGTTTTCCGGGACGCCGGCTGGATGATCCTCCAGCGCGGGGATCTCATGC
TGGAGTTCTTCGCCCACCCCAACTTGTTTATTGCAGCTTATAATGGTTACAAAT
AAAGCAATAGCATCACAAATTTCACAAATAAAGCATTTTTTTCACTGCATTCTA
GTTGTGGTTTGTCCAAACTCATCAATGTATCTTATCATGTCTGTATACCGTCGA
CCTCTAGCTAGAGCTTGGCGTAATCATGGTCATAGCTGTTTCCTGTGTGAAATT
GTTATCCGCTCACAATTCCACACAACATACGAGCCGGAAGCATAAAGTGTAAA
GCCTGGGGTGCCTAATGAGTGAGCTAACTCACATTAATTGCGTTGCGCTCACTG
CCCGCTTTCCAGTCGGGAAACCTGTCGTGCCAGCTGCATTAATGAATCGGCCA
ACGCGCGGGGAGAGGCGGTTTGCGTATTGGGCGCTCTTCCGCTTCCTCGCTCAC
TGACTCGCTGCGCTCGGTCGTTCGGCTGCGGCGAGCGGTATCAGCTCACTCAA
AGGCGGTAATACGGTTATCCACAGAATCAGGGGATAACGCAGGAA
(SEQ ID NO: 580)

### Example 11

[1632] BhCas12b (Bacillus hisashii Cas12b) was cloned into a plasmid (pcDNA3-BhCas12b). A map of the plasmid is shown in FIG. 26. The sequence of the cloned construct is shown in Table 20 below.

TABLE 20
Sequence of pcDNA3-BhCas12b

AGAACATGTGAGCAAAAGGCCAGCAAAAGGCCAGGAACCGTAAAAAGGCC
GCGTTGCTGGCGTTTTTCCATAGGCTCCGCCCCCCTGACGAGCATCACAA
AAATCGACGCTCAAGTCAGAGGTGGCGAAACCCGACAGGACTATAAAGAT
ACCAGGCGTTTCCCCCTGGAAGCTCCCTCGTGCGCTCTCCTGTTCCGACC
CTGCCGCTTACCGGATACCTGTCCGCCTTTCTCCCTTCGGGAAGCGTGGC
GCTTTCTCATAGCTCACGCTGTAGGTATCTCAGTTCGGTGTAGGTCGTTC
GCTCCAAGCTGGGCTGTGTGCACGAACCCCCCGTTCAGCCCGACCGCTGC
GCCTTATCCGGTAACTATCGTCTTGAGTCCAACCCGGTAAGACACGACTT
ATCGCCACTGGCAGCAGCCACTGGTAACAGGATTAGCAGAGCGAGGTATG
TAGGCGGTGCTACAGAGTTCTTGAAGTGGTGGCCTAACTACGGCTACACT
AGAAGAACAGTATTTGGTATCTGCGCTCTGCTGAAGCCAGTTACCTTCGG
AAAAAGAGTTGGTAGCTCTTGATCCGGCAAACAAACCACCGCTGGTAGCG
GTGGTTTTTTTGTTTGCAAGCAGCAGATTACGCGCAGAAAAAAAGGATCT
CAAGAAGATCCTTTGATCTTTTCTACGGGGTCTGACGCTCAGTGGAACGA
AAACTCACGTTAAGGGATTTTGGTCATGAGATTATCAAAAAGGATCTTCA
CCTAGATCCTTTTAAATTAAAAATGAAGTTTTAAATCAATCTAAAGTATA
TATGAGTAAACTTGGTCTGACAGTTACCAATGCTTAATCAGTGAGGCACC
TATCTCAGCGATCTGTCTATTTCGTTCATCCATAGTTGCCTGACTCCCCG
TCGTGTAGATAACTACGATACGGGAGGGCTTACCATCTGGCCCCAGTGCT
GCAATGATACCGCGAGACCCACGCTCACCGGCTCCAGATTTATCAGCAAT
AAACCAGCCAGCCGGAAGGGCCGAGCGCAGAAGTGGTCCTGCAACTTTAT
CCGCCTCCATCCAGTCTATTAATTGTTGCCGGGAAGCTAGAGTAAGTAGT
TCGCCAGTTAATAGTTTGCGCAACGTTGTTGCCATTGCTACAGGCATCGT
GGTGTCACGCTCGTCGTTTGGTATGGCTTCATTCAGCTCCGGTTCCCAAC
GATCAAGGCGAGTTACATGATCCCCCATGTTGTGCAAAAAAGCGGTTAGC
TCCTTCGGTCCTCCGATCGTTGTCAGAAGTAAGTTGGCCGCAGTGTTATC
ACTCATGGTTATGGCAGCACTGCATAATTCTCTTACTGTCATGCCATCCG
TAAGATGCTTTTCTGTGACTGGTGAGTACTCAACCAAGTCATTCTGAGAA
TAGTGTATGCGGCGACCGAGTTGCTCTTGCCCGGCGTCAATACGGGATAA
TACCGCGCCACATAGCAGAACTTTAAAAGTGCTCATCATTGGAAAACGTT
CTTCGGGGCGAAAACTCTCAAGGATCTTACCGCTGTTGAGATCCAGTTCG
ATGTAACCCACTCGTGCACCCAACTGATCTTCAGCATCTTTTACTTTCAC
CAGCGTTTCTGGGTGAGCAAAAACAGGAAGGCAAAATGCCGCAAAAAAGG
GAATAAGGGCGACACGGAAATGTTGAATACTCATACTCTTCCTTTTTCAA
TATTATTGAAGCATTTATCAGGGTTATTGTCTCATGAGCGGATACATATT
TGAATGTATTTAGAAAAATAAACAAATAGGGGTTCCGCGCACATTTCCCC
GAAAAGTGCCACCTGACGTCGACGGATCGGGAGATCTCCCGATCCCCTAT
GGTGCACTCTCAGTACAATCTGCTCTGATGCCGCATAGTTAAGCCAGTAT
CTGCTCCCTGCTTGTGTGTTGGAGGTCGCTGAGTAGTGCGCGAGCAAAAT
TTAAGCTACAACAAGGCAAGGCTTGACCGACAATTGCATGAAGAATCTGC
TTAGGGTTAGGCGTTTTGCGCTGCTTCGCGATGTACGGGCCAGATATACG
CGTTGACATTGATTATTGACTAGTTATTAATAGTAATCAATTACGGGGTC
ATTAGTTCATAGCCCATATATGGAGTTCCGCGTTACATAACTTACGGTAA
ATGGCCCGCCTGGCTGACCGCCCAACGACCCCCGCCCATTGACGTCAATA
ATGACGTATGTTCCCATAGTAACGCCAATAGGGACTTTCCATTGACGTCA
ATGGGTGGAGTATTTACGGTAAACTGCCCACTTGGCAGTACATCAAGTGT
ATCATATGCCAAGTACGCCCCCTATTGACGTCAATGACGGTAAATGGCCC
GCCTGGCATTATGCCCAGTACATGACCTTATGGGACTTTCCTACTTGGCA
GTACATCTACGTATTAGTCATCGCTATTACCATGGTGATGCGGTTTTGGC
AGTACATCAATGGGCGTGGATAGCGGTTTGACTCACGGGGATTTCCAAGT
CTCCACCCCATTGACGTCAATGGGAGTTTGTTTTGGCACCAAAATCAACG
GGACTTTCCAAAATGTCGTAACAACTCCGCCCCATTGACGCAAATGGGCG
GTAGGCGTGTACGGTGGGAGGTCTATATAAGCAGAGCTCTCTGGCTAACT
AGAGAACCCACTGCTTACTGGCTTATCGAAATTAATACGACTCACTATAG
GGAGACCCAAGCTGGCTAGCGTTTAAACTTAAGCTTGCCACCATGGCCCC
AAAGAAGAAGCGGAAGGTCGGTATCCACGGAGTCCCAGCAGCCGGATCCG
CCACCAGATCCTTCATCCTGAAGATCGAGCCCAACGAGGAAGTGAAGAAA
GGCCTCTGGAAAACCCACGAGGTGCTGAACCACGGAATCGCCTACTACAT
GAATATCCTGAAGCTGATCCGGCAAGAGGCCATCTACGAGCACCACGAGC
AGGACCCCAAGAATCCCAAGAAGGTGTCCAAGGCCGAGATCCAGGCCGAG
CTGTGGGATTTCGTGCTGAAGATGCAGAAGTGCAACAGCTTCACACACGA
GGTGGACAAGGACGAGGTGTTCAACATCCTGAGAGAGCTGTACGAGGAAC
TGGTGCCCAGCAGCGTGGAAAAGAAGGGCGAAGCCAACCAGCTGAGCAAC
AAGTTTCTGTACCCTCTGGTGGACCCCAACAGCCAGTCTGGAAAGGGAAC
AGCCAGCAGCGGCAGAAAGCCCAGATGGTACAACCTGAAGATTGCCGGCG
ATCCCTCCTGGGAAGAAGAGAAGAAGAAGTGGGAAGAAGATAAGAAAAAG
GACCCGCTGGCCAAGATCCTGGGCAAGCTGGCTGAGTACGGACTGATCCC
TCTGTTCATCCCCTACACCGACAGCAACGAGCCCATCGTGAAAGAAATCA
AGTGGATGGAAAAGTCCCGGAACCAGAGCGTGCGGCGGCTGGATAAGGAC
ATGTTCATTCAGGCCCTGGAACGGTTCCTGAGCTGGGAGAGCTGGAACCT
GAAAGTGAAAGAGGAATACGAGAAGGTCGAGAAAGAGTACAAGACCCTGG
AAGAGAGGATCAAAGAGGACATCCAGGCTCTGAAGGCTCTGGAACAGTAT
GAGAAAGAGCGGCAAGAACAGCTGCTGCGGGACACCCTGAACACCAACGA
GTACCGGCTGAGCAAGAGAGGCCTTAGAGGCTGGCGGGAAATCATCCAGA
AATGGCTGAAAATGGACGAGAACGAGCCCTCCGAGAAGTACCTGGAAGTG
TTCAAGGACTACCAGCGGAAGCACCCTAGAGAGGCCGGCGATTACAGCGT
GTACGAGTTCCTGTCCAAGAAAGAGAACCACTTCATCTGGCGGAATCACC
CTGAGTACCCCTACCTGTACGCCACCTTCTGCGAGATCGACAAGAAAAAG
AAGGACGCCAAGCAGCAGGCCACCTTCACACTGGCCGATCCTATCAATCA
CCCTCTGTGGGTCCGATTCGAGGAAAGAAGCGGCAGCAACCTGAACAAGT
ACAGAATCCTGACCGAGCAGCTGCACACCGAGAAGCTGAAGAAAAAGCTG
ACAGTGCAGCTGGACCGGCTGATCTACCCTACAGAATCTGGCGGCTGGGA
AGAGAAGGGCAAAGTGGACATTGTGCTGCTGCCCAGCCGGCAGTTCTACA
ACCAGATCTTCCTGGACATCGAGGAAAAGGGCAAGCACGCCTTCACCTAC
AAGGATGAGAGCATCAAGTTCCCTCTGAAGGGCACACTCGGCGGAGCCAG
AGTGCAGTTCGACAGAGATCACCTGAGAAGATACCCTCACAAGGTGGAAA
GCGGCAACGTGGGCAGAATCTACTTCAACATGACCGTGAACATCGAGCCT
ACAGAGTCCCCAGTGTCCAAGTCTCTGAAGATCCACCGGGACGACTTCCC
CAAGGTGGTCAACTTCAAGCCCAAAGAACTGACCGAGTGGATCAAGGACA
GCAAGGGCAAGAAACTGAAGTCCGGCATCGAGTCCCTGGAAATCGGCCTG
AGAGTGATGAGCATCGACCTGGGACAGAGACAGGCCGCTGCCGCCTCTAT
TTTCGAGGTGGTGGATCAGAAGCCCGACATCGAAGGCAAGCTGTTTTTCC
CAATCAAGGGCACCGAGCTGTATGCCGTGCACAGAGCCAGCTTCAACATC
AAGCTGCCCGGCGAGACACTGGTCAAGAGCAGAGAAGTGCTGCGGAAGGC
CAGAGAGGACAATCTGAAACTGATGAACCAGAAGCTCAACTTCCTGCGGA
ACGTGCTGCACTTCCAGCAGTTCGAGGACATCACCGAGAGAGAGAAGCGG
GTCACCAAGTGGATCAGCAGACAAGAGAACAGCGACGTGCCCCTGGTGTA
CCAGGATGAGCTGATCCAGATCCGCGAGCTGATGTACAAGCCTTACAAGG
ACTGGGTCGCCTTCCTGAAGCAGCTCCACAAGAGACTGGAAGTCGAGATC
GGCAAAGAAGTGAAGCACTGGCGGAAGTCCCTGAGCGACGGAAGAAAGGG
CCTGTACGGCATCTCCCTGAAGAACATCGACGAGATCGATCGGACCCGGA
AGTTCCTGCTGAGATGGTCCCTGAGGCCTACCGAACCTGGCGAAGTGCGT
AGACTGGAACCCGGCCAGAGATTCGCCATCGACCAGCTGAATCACCTGAA
CGCCCTGAAAGAAGATCGGCTGAAGAAGATGGCCAACACCATCATCATGC
ACGCCCTGGGCTACTGCTACGACGTGCGGAAGAAGAAATGGCAGGCTAAG
AACCCCGCCTGCCAGATCATCCTGTTCGAGGATCTGAGCAACTACAACCC
CTACGAGGAAAGGTCCCGCTTCGAGAACAGCAAGCTCATGAAGTGGTCCA
GACGCGAGATCCCCAGACAGGTTGCACTGCAGGGCGAGATCTATGGCCTG
CAAGTGGGAGAAGTGGGCGCTCAGTTCAGCAGCAGATTCCACGCCAAGAC
AGGCAGCCCTGGCATCAGATGTAGCGTCGTGACCAAAGAGAAGCTGCAGG
ACAATCGGTTCTTCAAGAATCTGCAGAGAGAGGGCAGACTGACCCTGGAC
AAAATCGCCGTGCTGAAAGAGGGCGATCTGTACCCAGACAAAGGCGGCGA
GAAGTTCATCAGCCTGAGCAAGGATCGGAAGTGCGTGACCACACACGCCG
ACATCAACGCCGCTCAGAACCTGCAGAAGCGGTTCTGGACAAGAACCCAC
GGCTTCTACAAGGTGTACTGCAAGGCCTACCAGGTGGACGGCCAGACCGT
GTACATCCCTGAGAGCAAGGACCAGAAGCAGAAGATCATCGAAGAGTTCG
GCGAGGGCTACTTCATTCTGAAGGACGGGGTGTACGAATGGGTCAACGCC
GGCAAGCTGAAAATCAAGAAGGGCAGCTCCAAGCAGAGCAGCAGCGAGCT
GGTGGATAGCGACATCCTGAAAGACAGCTTCGACCTGGCCTCCGAGCTGA
AAGGCGAAAAGCTGATGCTGTACAGGGACCCCAGCGGCAATGTGTTCCCC
AGCGACAAATGGATGGCCGCTGGCGTGTTCTTCGGAAAGCTGGAACGCAT
CCTGATCAGCAAGCTGACCAACCAGTACTCCATCAGCACCATCGAGGACG
ACAGCAGCAAGCAGTCTATGGGATCCAAAAGGCCGGCGGCCACGAAAAAG
GCCGGCCAGGCAAAAAAGAAAAAGggatctTACCCATACGATGTTCCAGA
TTACGCTTATCCCTACGACGTGCCTGATTATGCATACCCATATGATGTCC
CCGACTATGCCtaaGAATTCTGCAGATATCCAGCACAGTGGCGGCCGCTC
GAGTCTAGAGGGCCCGTTTAAACCCGCTGATCAGCCTCGACTGTGCCTTC
TAGTTGCCAGCCATCTGTTGTTTGCCCCTCCCCCGTGCCTTCCTTGACCC
TGGAAGGTGCCACTCCCACTGTCCTTTCCTAATAAAATGAGGAAATTGCA
TCGCATTGTCTGAGTAGGTGTCATTCTATTCTGGGGGGTGGGGTGGGGCA
GGACAGCAAGGGGGAGGATTGGGAAGACAATAGCAGGCATGCTGGGGATG
CGGTGGGCTCTATGGCTTCTGAGGCGGAAAGAACCAGCTGGGGCTCTAGG
GGGTATCCCCACGCGCCCTGTAGCGGCGCATTAAGCGCGGCGGGTGTGGT
GGTTACGCGCAGCGTGACCGCTACACTTGCCAGCGCCCTAGCGCCCGCTC
CTTTCGCTTTCTTCCCTTCCTTTCTCGCCACGTTCGCCGGCTTTCCCCGT
CAAGCTCTAAATCGGGGGCTCCCTTTAGGGTTCCGATTTAGTGCTTTACG
GCACCTCGACCCCAAAAAACTTGATTAGGGTGATGGTTCACGTAGTGGGC
CATCGCCCTGATAGACGGTTTTTCGCCCTTTGACGTTGGAGTCCACGTTC
TTTAATAGTGGACTCTTGTTCCAAACTGGAACAACACTCAACCCTATCTC
GGTCTATTCTTTTGATTTATAAGGGATTTTGCCGATTTCGGCCTATTGGT
TAAAAAATGAGCTGATTTAACAAAAATTTAACGCGAATTAATTCTGTGGA
ATGTGTGTCAGTTAGGGTGTGGAAAGTCCCCAGGCTCCCCAGCAGGCAGA
AGTATGCAAAGCATGCATCTCAATTAGTCAGCAACCAGGTGTGGAAAGTC
CCCAGGCTCCCCAGCAGGCAGAAGTATGCAAAGCATGCATCTCAATTAGT
CAGCAACCATAGTCCCGCCCCTAACTCCGCCCATCCCGCCCCTAACTCCG
CCCAGTTCCGCCCATTCTCCGCCCCATGGCTGACTAATTTTTTTTATTTA
TGCAGAGGCCGAGGCCGCCTCTGCCTCTGAGCTATTCCAGAAGTAGTGAG
GAGGCTTTTTTGGAGGCCTAGGCTTTTGCAAAAAGCTCCCGGGAGCTTGT
ATATCCATTTTCGGATCTGATCAAGAGACAGGATGAGGATCGTTTCGCAT
GATTGAACAAGATGGATTGCACGCAGGTTCTCCGGCCGCTTGGGTGGAGA
GGCTATTCGGCTATGACTGGGCACAACAGACAATCGGCTGCTCTGATGCC
GCCGTGTTCCGGCTGTCAGCGCAGGGGCGCCCGGTTCTTTTTGTCAAGAC
CGACCTGTCCGGTGCCCTGAATGAACTGCAGGACGAGGCAGCGCGGCTAT
CGTGGCTGGCCACGACGGGCGTTCCTTGCGCAGCTGTGCTCGACGTTGTC
ACTGAAGCGGGAAGGGACTGGCTGCTATTGGGCGAAGTGCCGGGGCAGGA
TCTCCTGTCATCTCACCTTGCTCCTGCCGAGAAAGTATCCATCATGGCTG
ATGCAATGCGGCGGCTGCATACGCTTGATCCGGCTACCTGCCCATTCGAC
CACCAAGCGAAACATCGCATCGAGCGAGCACGTACTCGGATGGAAGCCGG
TCTTGTCGATCAGGATGATCTGGACGAAGAGCATCAGGGGCTCGCGCCAG
CCGAACTGTTCGCCAGGCTCAAGGCGCGCATGCCCGACGGCGAGGATCTC
GTCGTGACCCATGGCGATGCCTGCTTGCCGAATATCATGGTGGAAAATGG
CCGCTTTTCTGGATTCATCGACTGTGGCCGGCTGGGTGTGGCGGACCGCT
ATCAGGACATAGCGTTGGCTACCCGTGATATTGCTGAAGAGCTTGGCGGC
GAATGGGCTGACCGCTTCCTCGTGCTTTACGGTATCGCCGCTCCCGATTC
GCAGCGCATCGCCTTCTATCGCCTTCTTGACGAGTTCTTCTGAGCGGGAC
TCTGGGGTTCGAAATGACCGACCAAGCGACGCCCAACCTGCCATCACGAG
ATTTCGATTCCACCGCCGCCTTCTATGAAAGGTTGGGCTTCGGAATCGTT
TTCCGGGACGCCGGCTGGATGATCCTCCAGCGCGGGGATCTCATGCTGGA
GTTCTTCGCCCACCCCAACTTGTTTATTGCAGCTTATAATGGTTACAAAT
AAAGCAATAGCATCACAAATTTCACAAATAAAGCATTTTTTTCACTGCAT
TCTAGTTGTGGTTTGTCCAAACTCATCAATGTATCTTATCATGTCTGTAT
ACCGTCGACCTCTAGCTAGAGCTTGGCGTAATCATGGTCATAGCTGTTTC
CTGTGTGAAATTGTTATCCGCTCACAATTCCACACAACATACGAGCCGGA
AGCATAAAGTGTAAAGCCTGGGGTGCCTAATGAGTGAGCTAACTCACATT
AATTGCGTTGCGCTCACTGCCCGCTTTCCAGTCGGGAAACCTGTCGTGCC
AGCTGCATTAATGAATCGGCCAACGCGCGGGGAGAGGCGGTTTGCGTATT
GGGCGCTCTTCCGCTTCCTCGCTCACTGACTCGCTGCGCTCGGTCGTTCG
GCTGCGGCGAGCGGTATCAGCTCACTCAAAGGCGGTAATACGGTTATCCA
CAGAATCAGGGGATAACGCAGGAA (SEQ ID NO: 581)

### Example 12

[1633] EbCas12b (Elusimicrobia bacterium Cas12b) was cloned into a plasmid (pcDNA3-EbCas12b). A map of the plasmid is shown in FIG. 27. The sequence of the cloned construct is shown in Table 21 below.

TABLE 21
Sequence of pcDNA3-EbCas12b

AGAACATGTGAGCAAAAGGCCAGCAAAAGGCCAGGAACCGTAAAAAGGCC
GCGTTGCTGGCGTTTTTCCATAGGCTCCGCCCCCCTGACGAGCATCACAA
AAATCGACGCTCAAGTCAGAGGTGGCGAAACCCGACAGGACTATAAAGAT
ACCAGGCGTTTCCCCCTGGAAGCTCCCTCGTGCGCTCTCCTGTTCCGACC
CTGCCGCTTACCGGATACCTGTCCGCCTTTCTCCCTTCGGGAAGCGTGGC
GCTTTCTCATAGCTCACGCTGTAGGTATCTCAGTTCGGTGTAGGTCGTTC
GCTCCAAGCTGGGCTGTGTGCACGAACCCCCCGTTCAGCCCGACCGCTGC
GCCTTATCCGGTAACTATCGTCTTGAGTCCAACCCGGTAAGACACGACTT
ATCGCCACTGGCAGCAGCCACTGGTAACAGGATTAGCAGAGCGAGGTATG
TAGGCGGTGCTACAGAGTTCTTGAAGTGGTGGCCTAACTACGGCTACACT
AGAAGAACAGTATTTGGTATCTGCGCTCTGCTGAAGCCAGTTACCTTCGG
AAAAAGAGTTGGTAGCTCTTGATCCGGCAAACAAACCACCGCTGGTAGCG
GTGGTTTTTTTGTTTGCAAGCAGCAGATTACGCGCAGAAAAAAAGGATCT
CAAGAAGATCCTTTGATCTTTTCTACGGGGTCTGACGCTCAGTGGAACGA
AAACTCACGTTAAGGGATTTTGGTCATGAGATTATCAAAAAGGATCTTCA
CCTAGATCCTTTTAAATTAAAAATGAAGTTTTAAATCAATCTAAAGTATA
TATGAGTAAACTTGGTCTGACAGTTACCAATGCTTAATCAGTGAGGCACC
TATCTCAGCGATCTGTCTATTTCGTTCATCCATAGTTGCCTGACTCCCCG
TCGTGTAGATAACTACGATACGGGAGGGCTTACCATCTGGCCCCAGTGCT
GCAATGATACCGCGAGACCCACGCTCACCGGCTCCAGATTTATCAGCAAT
AAACCAGCCAGCCGGAAGGGCCGAGCGCAGAAGTGGTCCTGCAACTTTAT
CCGCCTCCATCCAGTCTATTAATTGTTGCCGGGAAGCTAGAGTAAGTAGT
TCGCCAGTTAATAGTTTGCGCAACGTTGTTGCCATTGCTACAGGCATCGT
GGTGTCACGCTCGTCGTTTGGTATGGCTTCATTCAGCTCCGGTTCCCAAC
GATCAAGGCGAGTTACATGATCCCCCATGTTGTGCAAAAAAGCGGTTAGC
TCCTTCGGTCCTCCGATCGTTGTCAGAAGTAAGTTGGCCGCAGTGTTATC
ACTCATGGTTATGGCAGCACTGCATAATTCTCTTACTGTCATGCCATCCG
TAAGATGCTTTTCTGTGACTGGTGAGTACTCAACCAAGTCATTCTGAGAA
TAGTGTATGCGGCGACCGAGTTGCTCTTGCCCGGCGTCAATACGGGATAA
TACCGCGCCACATAGCAGAACTTTAAAAGTGCTCATCATTGGAAAACGTT
CTTCGGGGCGAAAACTCTCAAGGATCTTACCGCTGTTGAGATCCAGTTCG
ATGTAACCCACTCGTGCACCCAACTGATCTTCAGCATCTTTTACTTTCAC
CAGCGTTTCTGGGTGAGCAAAAACAGGAAGGCAAAATGCCGCAAAAAAGG
GAATAAGGGCGACACGGAAATGTTGAATACTCATACTCTTCCTTTTTCAA
TATTATTGAAGCATTTATCAGGGTTATTGTCTCATGAGCGGATACATATT
TGAATGTATTTAGAAAAATAAACAAATAGGGGTTCCGCGCACATTTCCCC
GAAAAGTGCCACCTGACGTCGACGGATCGGGAGATCTCCCGATCCCCTAT
GGTGCACTCTCAGTACAATCTGCTCTGATGCCGCATAGTTAAGCCAGTAT
CTGCTCCCTGCTTGTGTGTTGGAGGTCGCTGAGTAGTGCGCGAGCAAAAT
TTAAGCTACAACAAGGCAAGGCTTGACCGACAATTGCATGAAGAATCTGC
TTAGGGTTAGGCGTTTTGCGCTGCTTCGCGATGTACGGGCCAGATATACG
CGTTGACATTGATTATTGACTAGTTATTAATAGTAATCAATTACGGGGTC
ATTAGTTCATAGCCCATATATGGAGTTCCGCGTTACATAACTTACGGTAA
ATGGCCCGCCTGGCTGACCGCCCAACGACCCCCGCCCATTGACGTCAATA
ATGACGTATGTTCCCATAGTAACGCCAATAGGGACTTTCCATTGACGTCA
ATGGGTGGAGTATTTACGGTAAACTGCCCACTTGGCAGTACATCAAGTGT
ATCATATGCCAAGTACGCCCCCTATTGACGTCAATGACGGTAAATGGCCC
GCCTGGCATTATGCCCAGTACATGACCTTATGGGACTTTCCTACTTGGCA
GTACATCTACGTATTAGTCATCGCTATTACCATGGTGATGCGGTTTTGGC
AGTACATCAATGGGCGTGGATAGCGGTTTGACTCACGGGGATTTCCAAGT
CTCCACCCCATTGACGTCAATGGGAGTTTGTTTTGGCACCAAAATCAACG
GGACTTTCCAAAATGTCGTAACAACTCCGCCCCATTGACGCAAATGGGCG
GTAGGCGTGTACGGTGGGAGGTCTATATAAGCAGAGCTCTCTGGCTAACT
AGAGAACCCACTGCTTACTGGCTTATCGAAATTAATACGACTCACTATAG
GGAGACCCAAGCTGGCTAGCGTTTAAACTTAAGCTTGCCACCATGGCCCC
AAAGAAGAAGCGGAAGGTCGGTATCCACGGAGTCCCAGCAGCCGGATCCA
ACCGGATCTACCAGGGCAGAGTGACCAAGGTGGAAGTGCCCGATGGCAAG
GACGAGAAGGGCAACATCAAGTGGAAGAAGCTGGAAAATTGGAGCGACAT
CCTGTGGCAGCACCACATGCTGTTCCAGGACGCCGTGAACTACTACACAC
TGGCCCTGGCCGCCATCTCTGGATCTGCTGTTGGCAGCGACGAGAAGTCC
ATCATCCTGAGAGAATGGGCCGTGCAGGTCCAGAACATCTGGGAGAAAGC
CAAGAAAAAGGCCACCGTGTTCGAGGGCCCACAGAAGAGACTGACCAGCA
TCCTGGGCCTTGAGCAGAACGCCAGCTTCGACATTGCCGCCAAGCACATC
CTGAGGACCTCTGAGGCCAAGCCTGAGCAGAGAGCTAGCGCCCTGATCAG
ACTGCTGGAAGAGATCGACAAGAAAAACCACAACGTCGTGTGCGGCGAGC
GGCTGCCTTTTTTCTGCCCTCGGAACATCCAGAGCAAGCGGAGCCCTACA
AGCAAGGCCGTGTCTAGCGTGCAAGAGCAGAAACGGCAAGAGGAAGTGCG
GCGGTTCCACAACATGCAGCCTGAGGAAGTGGTCAAGAACGCCGTGACAC
TGGACATCAGCCTGTTCAAGAGCAGCCCCAAGATCGTGTTCCTGGAAGAT
CCCAAGAAGGCCAGAGCCGAGCTGCTGAAGCAGTTCGACAACGCCTGCAA
GAAACACAAAGAACTCGTGGGCATCAAGAAAGCCTTCACCGAGTCCATCG
ACAAGCACGGCTCTAGCCTGAAGGTGCCAGCTCCTGGCTCTAAGCCTAGC
GGCCTGTATCCTAGCGCCATCGTGTTCAAGTACTTCCCCGTGGATATTAC
CAAGACCGTGTTTCTGAAGGCCACAGAGAAGCTGGCCATGGGCAAAGACC
GGGAAGTGACCAACGATCCTATCGCCGACGCCAGAGTGAACGACAAGCCC
CACTTCGACTACTTCACCAACATTGCCCTGATCCGCGAGAAAGAGAAGAA
CAGAGCCGCTTGGTTTGAGTTCGATCTGGCCGCCTTTATCGAGGCCATCA
TGAGCCCTCACAGATTCTACCAGGACACCCAGAAGCGGAAAGAGGCCGCC
AGAAAGCTGGAAGAAAAGATCAAGGCCATCGAAGGCAAAGGCGGGCAGTT
CAAAGAGAGCGACAGCGAGGACGACGACGTGGACTCTCTGCCTGGATTTG
AGGGCGACACCAGAATCGACCTGCTGCGGAAGCTGGTCACCGATACACTT
GGATGGCTGGGCGAGAGCGAGACACCCGATAACAACGAGGGCAAAAAGAC
CGAGTACAGCATCAGCGAGCGGACCCTGAGAATCTTCCCCGACATCCAGA
AGCAGTGGAGCGAGCTGGCCGAGAAAGGCGAGACAACAGAGGGAAAGCTG
CTCGAAGTGCTGAAACACGAGCAGACCGAGCACCAGAGCGATTTCGGAAG
CGCCACACTGTATCAGCACCTGGCCAAGCCAGAGTTTCACCCCATCTGGC
TGAAGTCCGGCACCGAGGAATGGCACGCCGAGAATCCTCTGAAAGCCTGG
CTGAACTACAAAGAGCTGCAGTACGAGCTGACCGACAAGAAGCGGCCCAT
CCACTTTACCCCTGCTCACCCTGTGTACAGCCCCAGATACTTCGACTTCC
CCAAGAAGTCCGAAACCGAAGAGAAAGAGGTGTCCAAGAACACCCACAGC
CTGACCACAAGCCTGGCCAGCGAGCACATCAAGAACTCCCTGCAGTTTAC
AGCCGGGCTGATCAGAAAGACCAACGTGGGCAAGAAGGCTATCAAGGCCC
GGTTCAGCTACAGCGCCCCTAGACTGAGAAGGGACTGCCTGAGAAGCGAG
AACAACGAGAACCTGTACAAGGCCCCTTGGCTCCAGCCTATGATGAGAGC
CCTGGGCATCGACGAGGAAAAGGCCGACAGACAGAACTTCGCCAACACCA
GGATCACCCTGATGGCCAAAGGCCTGGACGACATTCAGCTGGGCTTTCCC
GTGGAAGCCAACAGCCAAGAACTGCAGAAAGAAGTGTCTAACGGCATCAG
CTGGAAGGGCCAGTTCAACTGGGGAGGAATCGCCTCTCTGTCTGCCCTGA
GATGGCCCCACGAGAAGAAGCCCAAGAATCCTCCTGAGCAGCCTTGGTGG
GGCATCGATAGCTTTAGCTGCCTGGCCGTGGATCTGGGCCAGAGATATGC
TGGCGCCTTCGCCAGACTGGACGTGTCCACCATTGAGAAAAAGGGCAAGA
GCCGGTTCATCGGCGAGGCCTGCGACAAAAAGTGGTACGCCAAGGTGTCC
CGGATGGGCCTGTTGAGACTTCCTGGCGAGGACGTGAAAGTGTGGCGGGA
TGCCAGCAAGATTGACAAAGAGAACGGCTTCGCCTTCCGGAAAGAGCTGT
TCGGCGAGAAGGGAAGATCCGCCACACCTCTGGAAGCCGAGGAAACCGCC
GAGCTGATCAAGCTGTTTGGAGCCAACGAGAAGGACGTGATGCCCGACAA
CTGGTCTAAAGAGCTGAGCTTCCCCGAGCAGAATGACAAGCTGCTGATCG
TGGCTCGGAGAGCCCAGGCTGCTGTTAGCAGACTGCATAGATGGGCATGG
TTCTTCGACGAGGCCAAGAGATCCGACGACGCCATCAGAGAGATTCTGGA
AAGCGACGACACCGACCTGAAGCAGAAAGTGAACAAGAACGAGATCGAGA
AAGTCAAAGAGACAATCATCTCCCTGCTGAAAGTCAAGCAAGAGCTGCTG
CCCACACTGCTGACCAGACTGGCCAATAGAGTGCTGCCCCTGAGAGGCAG
ATCCTGGGAGTGGAAAAAGCACCACCAGAAGAACGACGGCTTCATCCTGG
ACCAGACCGGCAAGGCCATGCCTAACGTGCTGATTAGAGGACAGCGGGGC
CTGAGCATGGACCGGATCGAGCAGATTACCGAGCTGAGAAAGCGGTTTCA
GGCCCTGAACCAGAGCCTGCGGAGACAGATCGGAAAGAAGGCCCCTGCCA
AGCGGGACGACTCTATCCCTGATTGCTGCCCCGATCTGCTGGAAAAACTG
GACCACATGAAGGAACAGCGCGTGAACCAGACAGCCCACATGATTCTGGC
CGAGGCACTGGGACTGAAACTGGCCGAGCCTCCTAAGGACAAGAAAGAAC
TGAACGAGACATGCGACATGCACGGCGCCTACGCCAAAGTGGACAACCCC
GTGTCCTTCATCGTGATCGAGGACCTGAGCCGGTACAGAAGCAGCCAAGG
CAGAAGCCCCAGAGAAAACAGCCGACTGATGAAGTGGTGCCACAGGGCCG
TCAGAGACAAGCTGAAAGAAATGTGCGAGGTGTTCTTCCCACTGTGCGAG
AGAAGAAAGGCCGGCTCTGCTTGGGTTTCCCTGCCTCCTCTGCTTGAAAC
ACCAGCCGCCTACAGCAGCAGATTCTGCAGCAGATCTGGCGTGGCCGGCT
TCAGAGCCGTGGAAGTGATTCCTGGCTTCGAGCTGAAGTACCCCTGGTCT
TGGCTGAAGGATAAGAAGGACAAGGCCGGCAATCTGGCCAAAGAAGCCCT
GAACATCCGGACCGTGTCTGAGCAGCTGAAGGCCTTTAACCAGGACAAGC
CCGAGAAGCCCAGGACACTGCTGGTGCCTATTGCCGGCGGACCTATCTTC
GTGCCCATCTCTGAAGTGGGCCTGTCCAGCTTCGGACTGAAGCCTCAGGT
TGTGCAGGCCGACATCAACGCCGCCATCAATCTGGGACTCAGAGCCATCA
GCGACCCTCGGATTTGGGAGATTCACCCCAGACTGCGGACCGAGAAGAGA
GATGGCAGACTGTTCGCCAGAGAGAAACGGAAGTACGGCGAAGAGAAGGT
CGAGGTGCAGCCCAGCAAGAATGAGAAGGCCAAAAAAGTGAAGGACGACC
GGAAGCCTAACTACTTCGCCGATTTCAGCGGCAAGGTGGACTGGGGCTTT
GGCAACATTAAGAACGAGTCCGGCCTGACACTGGTGTCTGGCAAAGCACT
GTGGTGGACCATCAACCAGCTGCAGTGGGAGAGATGCTTTGACATCAACA
AGCGGCACATCGAGGACTGGTCCAACAAGCAGAAGCAAGGATCCAAAAGG
CCGGCGGCCACGAAAAAGGCCGGCCAGGCAAAAAAGAAAAAGggatctTA
CCCATACGATGTTCCAGATTACGCTTATCCCTACGACGTGCCTGATTATG
CATACCCATATGATGTCCCCGACTATGCCtaaGAATTCTGCAGATATCCA
GCACAGTGGCGGCCGCTCGAGTCTAGAGGGCCCGTTTAAACCCGCTGATC
AGCCTCGACTGTGCCTTCTAGTTGCCAGCCATCTGTTGTTTGCCCCTCCC
CCGTGCCTTCCTTGACCCTGGAAGGTGCCACTCCCACTGTCCTTTCCTAA
TAAAATGAGGAAATTGCATCGCATTGTCTGAGTAGGTGTCATTCTATTCT
GGGGGGTGGGGTGGGGCAGGACAGCAAGGGGGAGGATTGGGAAGACAATA
GCAGGCATGCTGGGGATGCGGTGGGCTCTATGGCTTCTGAGGCGGAAAGA
ACCAGCTGGGGCTCTAGGGGGTATCCCCACGCGCCCTGTAGCGGCGCATT
AAGCGCGGCGGGTGTGGTGGTTACGCGCAGCGTGACCGCTACACTTGCCA
GCGCCCTAGCGCCCGCTCCTTTCGCTTTCTTCCCTTCCTTTCTCGCCACG
TTCGCCGGCTTTCCCCGTCAAGCTCTAAATCGGGGGCTCCCTTTAGGGTT
CCGATTTAGTGCTTTACGGCACCTCGACCCCAAAAAACTTGATTAGGGTG
ATGGTTCACGTAGTGGGCCATCGCCCTGATAGACGGTTTTTCGCCCTTTG
ACGTTGGAGTCCACGTTCTTTAATAGTGGACTCTTGTTCCAAACTGGAAC
AACACTCAACCCTATCTCGGTCTATTCTTTTGATTTATAAGGGATTTTGC
CGATTTCGGCCTATTGGTTAAAAAATGAGCTGATTTAACAAAAATTTAAC
GCGAATTAATTCTGTGGAATGTGTGTCAGTTAGGGTGTGGAAAGTCCCCA
GGCTCCCCAGCAGGCAGAAGTATGCAAAGCATGCATCTCAATTAGTCAGC
AACCAGGTGTGGAAAGTCCCCAGGCTCCCCAGCAGGCAGAAGTATGCAAA
GCATGCATCTCAATTAGTCAGCAACCATAGTCCCGCCCCTAACTCCGCCC
ATCCCGCCCCTAACTCCGCCCAGTTCCGCCCATTCTCCGCCCCATGGCTG
ACTAATTTTTTTTATTTATGCAGAGGCCGAGGCCGCCTCTGCCTCTGAGC
TATTCCAGAAGTAGTGAGGAGGCTTTTTTGGAGGCCTAGGCTTTTGCAAA
AAGCTCCCGGGAGCTTGTATATCCATTTTCGGATCTGATCAAGAGACAGG
ATGAGGATCGTTTCGCATGATTGAACAAGATGGATTGCACGCAGGTTCTC
CGGCCGCTTGGGTGGAGAGGCTATTCGGCTATGACTGGGCACAACAGACA
ATCGGCTGCTCTGATGCCGCCGTGTTCCGGCTGTCAGCGCAGGGGCGCCC
GGTTCTTTTTGTCAAGACCGACCTGTCCGGTGCCCTGAATGAACTGCAGG
ACGAGGCAGCGCGGCTATCGTGGCTGGCCACGACGGGCGTTCCTTGCGCA
GCTGTGCTCGACGTTGTCACTGAAGCGGGAAGGGACTGGCTGCTATTGGG
CGAAGTGCCGGGGCAGGATCTCCTGTCATCTCACCTTGCTCCTGCCGAGA
AAGTATCCATCATGGCTGATGCAATGCGGCGGCTGCATACGCTTGATCCG
GCTACCTGCCCATTCGACCACCAAGCGAAACATCGCATCGAGCGAGCACG
TACTCGGATGGAAGCCGGTCTTGTCGATCAGGATGATCTGGACGAAGAGC
ATCAGGGGCTCGCGCCAGCCGAACTGTTCGCCAGGCTCAAGGCGCGCATG
CCCGACGGCGAGGATCTCGTCGTGACCCATGGCGATGCCTGCTTGCCGAA
TATCATGGTGGAAAATGGCCGCTTTTCTGGATTCATCGACTGTGGCCGGC
TGGGTGTGGCGGACCGCTATCAGGACATAGCGTTGGCTACCCGTGATATT
GCTGAAGAGCTTGGCGGCGAATGGGCTGACCGCTTCCTCGTGCTTTACGG
TATCGCCGCTCCCGATTCGCAGCGCATCGCCTTCTATCGCCTTCTTGACG
AGTTCTTCTGAGCGGGACTCTGGGGTTCGAAATGACCGACCAAGCGACGC
CCAACCTGCCATCACGAGATTTCGATTCCACCGCCGCCTTCTATGAAAGG
TTGGGCTTCGGAATCGTTTTCCGGGACGCCGGCTGGATGATCCTCCAGCG
CGGGGATCTCATGCTGGAGTTCTTCGCCCACCCCAACTTGTTTATTGCAG
CTTATAATGGTTACAAATAAAGCAATAGCATCACAAATTTCACAAATAAA
GCATTTTTTTCACTGCATTCTAGTTGTGGTTTGTCCAAACTCATCAATGT
ATCTTATCATGTCTGTATACCGTCGACCTCTAGCTAGAGCTTGGCGTAAT
CATGGTCATAGCTGTTTCCTGTGTGAAATTGTTATCCGCTCACAATTCCA
CACAACATACGAGCCGGAAGCATAAAGTGTAAAGCCTGGGGTGCCTAATG
AGTGAGCTAACTCACATTAATTGCGTTGCGCTCACTGCCCGCTTTCCAGT
CGGGAAACCTGTCGTGCCAGCTGCATTAATGAATCGGCCAACGCGCGGGG
AGAGGCGGTTTGCGTATTGGGCGCTCTTCCGCTTCCTCGCTCACTGACTC
GCTGCGCTCGGTCGTTCGGCTGCGGCGAGCGGTATCAGCTCACTCAAAGG
CGGTAATACGGTTATCCACAGAATCAGGGGATAACGCAGGAA
(SEQ ID NO: 582)

### Example 13

[1634] AkCas12b (Alicyclobacillus kakegawensis Cas12b) was cloned into a plasmid (pcDNA3-AkCas12b). A map of the plasmid is shown in FIG. 28. The sequence of the cloned contract is shown in Table 22 below.

TABLE 22
Sequence of pcDNA3-AkCas12b

AGAACATGTGAGCAAAAGGCCAGCAAAAGGCCAGGAACCGTAAAAAGGCCGC
GTTGCTGGCGTTTTTCCATAGGCTCCGCCCCCCTGACGAGCATCACAAAAATCG
ACGCTCAAGTCAGAGGTGGCGAAACCCGACAGGACTATAAAGATACCAGGCG
TTTCCCCCTGGAAGCTCCCTCGTGCGCTCTCCTGTTCCGACCCTGCCGCTTACC
GGATACCTGTCCGCCTTTCTCCCTTCGGGAAGCGTGGCGCTTTCTCATAGCTCA
CGCTGTAGGTATCTCAGTTCGGTGTAGGTCGTTCGCTCCAAGCTGGGCTGTGTG
CACGAACCCCCCGTTCAGCCCGACCGCTGCGCCTTATCCGGTAACTATCGTCTT
GAGTCCAACCCGGTAAGACACGACTTATCGCCACTGGCAGCAGCCACTGGTAA
CAGGATTAGCAGAGCGAGGTATGTAGGCGGTGCTACAGAGTTCTTGAAGTGGT
GGCCTAACTACGGCTACACTAGAAGAACAGTATTTGGTATCTGCGCTCTGCTG
AAGCCAGTTACCTTCGGAAAAAGAGTTGGTAGCTCTTGATCCGGCAAACAAAC
CACCGCTGGTAGCGGTGGTTTTTTTGTTTGCAAGCAGCAGATTACGCGCAGAA
AAAAAGGATCTCAAGAAGATCCTTTGATCTTTTCTACGGGGTCTGACGCTCAGT
GGAACGAAAACTCACGTTAAGGGATTTTGGTCATGAGATTATCAAAAAGGATC
TTCACCTAGATCCTTTTAAATTAAAAATGAAGTTTTAAATCAATCTAAAGTATA
TATGAGTAAACTTGGTCTGACAGTTACCAATGCTTAATCAGTGAGGCACCTATC
TCAGCGATCTGTCTATTTCGTTCATCCATAGTTGCCTGACTCCCCGTCGTGTAG
ATAACTACGATACGGGAGGGCTTACCATCTGGCCCCAGTGCTGCAATGATACC
GCGAGACCCACGCTCACCGGCTCCAGATTTATCAGCAATAAACCAGCCAGCCG
GAAGGGCCGAGCGCAGAAGTGGTCCTGCAACTTTATCCGCCTCCATCCAGTCT
ATTAATTGTTGCCGGGAAGCTAGAGTAAGTAGTTCGCCAGTTAATAGTTTGCG
CAACGTTGTTGCCATTGCTACAGGCATCGTGGTGTCACGCTCGTCGTTTGGTAT
GGCTTCATTCAGCTCCGGTTCCCAACGATCAAGGCGAGTTACATGATCCCCCAT
GTTGTGCAAAAAAGCGGTTAGCTCCTTCGGTCCTCCGATCGTTGTCAGAAGTA
AGTTGGCCGCAGTGTTATCACTCATGGTTATGGCAGCACTGCATAATTCTCTTA
CTGTCATGCCATCCGTAAGATGCTTTTCTGTGACTGGTGAGTACTCAACCAAGT
CATTCTGAGAATAGTGTATGCGGCGACCGAGTTGCTCTTGCCCGGCGTCAATA
CGGGATAATACCGCGCCACATAGCAGAACTTTAAAAGTGCTCATCATTGGAAA
ACGTTCTTCGGGGCGAAAACTCTCAAGGATCTTACCGCTGTTGAGATCCAGTTC
GATGTAACCCACTCGTGCACCCAACTGATCTTCAGCATCTTTTACTTTCACCAG
CGTTTCTGGGTGAGCAAAAACAGGAAGGCAAAATGCCGCAAAAAAGGGAATA
AGGGCGACACGGAAATGTTGAATACTCATACTCTTCCTTTTTCAATATTATTGA
AGCATTTATCAGGGTTATTGTCTCATGAGCGGATACATATTTGAATGTATTTAG
AAAAATAAACAAATAGGGGTTCCGCGCACATTTCCCCGAAAAGTGCCACCTGA
CGTCGACGGATCGGGAGATCTCCCGATCCCCTATGGTGCACTCTCAGTACAAT
CTGCTCTGATGCCGCATAGTTAAGCCAGTATCTGCTCCCTGCTTGTGTGTTGGA
GGTCGCTGAGTAGTGCGCGAGCAAAATTTAAGCTACAACAAGGCAAGGCTTGA
CCGACAATTGCATGAAGAATCTGCTTAGGGTTAGGCGTTTTGCGCTGCTTCGCG
ATGTACGGGCCAGATATACGCGTTGACATTGATTATTGACTAGTTATTAATAGT
AATCAATTACGGGGTCATTAGTTCATAGCCCATATATGGAGTTCCGCGTTACAT
AACTTACGGTAAATGGCCCGCCTGGCTGACCGCCCAACGACCCCCGCCCATTG
ACGTCAATAATGACGTATGTTCCCATAGTAACGCCAATAGGGACTTTCCATTG
ACGTCAATGGGTGGAGTATTTACGGTAAACTGCCCACTTGGCAGTACATCAAG
TGTATCATATGCCAAGTACGCCCCCTATTGACGTCAATGACGGTAAATGGCCC
GCCTGGCATTATGCCCAGTACATGACCTTATGGGACTTTCCTACTTGGCAGTAC
ATCTACGTATTAGTCATCGCTATTACCATGGTGATGCGGTTTTGGCAGTACATC
AATGGGCGTGGATAGCGGTTTGACTCACGGGGATTTCCAAGTCTCCACCCCAT
TGACGTCAATGGGAGTTTGTTTTGGCACCAAAATCAACGGGACTTTCCAAAAT
GTCGTAACAACTCCGCCCCATTGACGCAAATGGGCGGTAGGCGTGTACGGTGG
GAGGTCTATATAAGCAGAGCTCTCTGGCTAACTAGAGAACCCACTGCTTACTG
GCTTATCGAAATTAATACGACTCACTATAGGGAGACCCAAGCTGGCTAGCGTT
TAAACTTAAGCTTGCCACCATGGCCCCAAAGAAGAAGCGGAAGGTCGGTATCC
ACGGAGTCCCAGCAGCCGGATCCgccgtgaagtccatcaaagtgaagagcggctgagcgagtgccccga
tattctggctggaatgtggcagctgcacagagccacaaatgccggcgtgcggtactacacagaatgggtgtccctgat
gcggcaagagatcctgtacagcagaggccctgatggcggccagcagtgttatatgaccgccgaggattgccagagaga
gctgctgcggagactgcggaatagacagctgcataacggccggcaggatcagcctggaacagatgctgatctgctggc
catcagcagacggctgtacgagattctggtgctgcagagcatcggcaaaagaggcgacgcccagcagattgccagcag
ctttctgagccctctggtggaccccaacagcaaaggtggaagaggcgaggccaagagcggaagaaaacctgcctggca
gaagatgcgcgaccagggcgatcctagatgggttgccgctagagagaagtacgagcagcggaaggccgtggatcccag
caaagagattctgaacagcctggacgccctgggcctcagacctctgtttgccgtgttcaccgagacatacagatccgg
cgtggactggaagcctctgggcaaatctcagggcgtcagaacctgggacagagacatgtttcagcaggccctggaacg
gctgatgagctgggagagctggaatcggagagtgggcgaagagtacgccagactgttccagcagaaaatgaagttcga
gcaagagcacttcgccgagcagagccacctggtcaaactggctagagccctggaagccgatatgagagccgcctctca
gggcttcgaggccaaaagaggaacagcccaccagatcaccagaagggcactgagaggggccgacagagtgttcgagat
ctggaagtctatccccgaggaagccagttcagccagtacgacgaagtgatcagacaggtgcaggccgagaagcggaga
gatttcggcagccatgacctgttcgccaagctggccgagcctaagtatcagcccctttggagagccgacgagacattc
ctgaccagatacgccagtacaacggcgtgctgcgcgatctggaaaaggccagacagttcgccaccttcacactgcctg
atgcctgcgtgaaccccatctggaccagattcgagtctagccagggcagcaacctgcacaaatacgagtttctgttcg
accacctcggacctggcagacacgccgtcagatttcagagactgctggtggtggaaagcgagggcgccaaagaaaggg
atagcgtggtggtgcctgtggctccttctggccaactggataagctggtgctgagggaagaagagaagtccagcgtcg
ccagcatctgcacgataccgctagacccgatggcttcatggctgaatgggctggcgccaaactgcagtacgagagaag
caccctggccagaaaagccagacgggacaagcagggcatgagaagctggcggagacagccctccatgctgatgtctgc
cgctcagatgctggaagatgccaaacaggctggcgacgtgtacctgaacatcagcgtgcgcgtgaagtctcccagtga
agtgcgaggacagaggcggcctccttacgccgctctgtttagaatcgacgacaagcagcggagagtgaccgtgaacta
caacaagctgagcgcctacctggaagaacaccccgataagcagatccctggcgctcctggactgctgtctggactgag
agtgatgtccgtggacctgggcctgagaacaagcgccagcatctccgtgttcagagtggccaagaaagaagaggtgga
agccctcggagatggccggcctcctcactactatcctatccacggcaccgatgacctggtggccgtgcacgaaagatc
ccacctgattcagatgcccggcgaaaccgagacaaagcagctgcggaagctgagagaagaacggcaggccgtgctgag
gccactgtttgctcaactggcactgctgagactgctcgtcagatgtggcgccgctgacgagagaatcagaaccagatc
ctggcagcggctgaccaagcagggaagagagttcaccaagagactgacccctagctggcgcgaggctctggaactgga
actgacaagactcgaggcctactgcggcagagtgcccgatgatgagtggtccagaatcgtggacagaaccgtgattgc
cagtggcggagaatgggcaagcaagtgcgcgattggcggaagcaagtgaagtccggggccaaagtgaaagtgaagggc
taccagctggatgtcgtcggcggaaattctctggcccagatcgactatctggaacagcagtacaagttcctgcggcgt
tggagcttcttcgccagagcttctggcctggtcgtgcgggccgatagagaaagccattttgccgtggctctgagacag
cacatcgagaacgccaagcgggacagactgaagaaactggccgaccggatcctgatggaagcactgggctatgtgtac
gaggccagcggacctagagaaggccagtggacagctcagcaccctccttgccagctgatcattctcgaggaactgtcc
gcctaccggttcagcgacgatagacctcctagcgagaacagcaaactgatggcctggggccacagaggcatcctcgaa
gaactggtcaaccaggctcaggtgcacgatgtgctcgtgggcacagtgtacgccgccttcagcagcagattcgacgct
agaacaggtgctcccggcgtcagatgcagaagagtgcctgccagatttgtgggcgccaccgtggatgattctctgcca
ctgtggctgaccgagttcctggacaagcaccggctggataagaacctgctgcggcccgacgatgtgatcccaacaggc
gaaggcgaattcctggtgtccccttgtggcgaagaggctgccagagttagacaggttcacgccgacatcaacgctgcc
cagaacctgcagagaaggctgtggcagaacttcgacatcaccgagagaggctgagatgcgacgtgaagatgggcggag
agggaacagtgctggtgcccagagtgaacaacgccagagccaagcagctgttcggcaagaaggtgctggtttcccagg
acggcgtgaccttcttcgagagatctcagacaggcggcaagccccacagcgagaagcagaccgatctgaccgacaaag
aactcgagctgatcgccgaggccgatgaggccagagctaaaagcgtggtgctgttcagggatcctagcggccacattg
gcaaaggccactggatccggcagcgcgagttttggagtctggtcaagcagaggatcgagagccacaccgccgagc
ggattagagttagaggcgtgggaagctccctggacGGATCCAAAAGGCCGGCGGCCACGAAAAAG
GCCGGCCAGGCAAAAAAGAAAAAGggatctTACCCATACGATGTTCCAGATTACG
CTTATCCCTACGACGTGCCTGATTATGCATACCCATATGATGTCCCCGACTATG
CCtaaGAATTCTGCAGATATCCAGCACAGTGGCGGCCGCTCGAGTCTAGAGGGC
CCGTTTAAACCCGCTGATCAGCCTCGACTGTGCCTTCTAGTTGCCAGCCATCTG
TTGTTTGCCCCTCCCCCGTGCCTTCCTTGACCCTGGAAGGTGCCACTCCCACTG
TCCTTTCCTAATAAAATGAGGAAATTGCATCGCATTGTCTGAGTAGGTGTCATT
CTATTCTGGGGGGTGGGGTGGGGCAGGACAGCAAGGGGGAGGATTGGGAAGA
CAATAGCAGGCATGCTGGGGATGCGGTGGGCTCTATGGCTTCTGAGGCGGAAA
GAACCAGCTGGGGCTCTAGGGGGTATCCCCACGCGCCCTGTAGCGGCGCATTA
AGCGCGGCGGGTGTGGTGGTTACGCGCAGCGTGACCGCTACACTTGCCAGCGC
CCTAGCGCCCGCTCCTTTCGCTTTCTTCCCTTCCTTTCTCGCCACGTTCGCCGGC
TTTCCCCGTCAAGCTCTAAATCGGGGGCTCCCTTTAGGGTTCCGATTTAGTGCT
TTACGGCACCTCGACCCCAAAAAACTTGATTAGGGTGATGGTTCACGTAGTGG
GCCATCGCCCTGATAGACGGTTTTTCGCCCTTTGACGTTGGAGTCCACGTTCTT
TAATAGTGGACTCTTGTTCCAAACTGGAACAACACTCAACCCTATCTCGGTCTA
TTCTTTTGATTTATAAGGGATTTTGCCGATTTCGGCCTATTGGTTAAAAAATGA
GCTGATTTAACAAAAATTTAACGCGAATTAATTCTGTGGAATGTGTGTCAGTTA
GGGTGTGGAAAGTCCCCAGGCTCCCCAGCAGGCAGAAGTATGCAAAGCATGC
ATCTCAATTAGTCAGCAACCAGGTGTGGAAAGTCCCCAGGCTCCCCAGCAGGC
AGAAGTATGCAAAGCATGCATCTCAATTAGTCAGCAACCATAGTCCCGCCCCT
AACTCCGCCCATCCCGCCCCTAACTCCGCCCAGTTCCGCCCATTCTCCGCCCCA
TGGCTGACTAATTTTTTTTATTTATGCAGAGGCCGAGGCCGCCTCTGCCTCTGA
GCTATTCCAGAAGTAGTGAGGAGGCTTTTTTGGAGGCCTAGGCTTTTGCAAAA
AGCTCCCGGGAGCTTGTATATCCATTTTCGGATCTGATCAAGAGACAGGATGA
GGATCGTTTCGCATGATTGAACAAGATGGATTGCACGCAGGTTCTCCGGCCGC
TTGGGTGGAGAGGCTATTCGGCTATGACTGGGCACAACAGACAATCGGCTGCT
CTGATGCCGCCGTGTTCCGGCTGTCAGCGCAGGGGCGCCCGGTTCTTTTTGTCA
AGACCGACCTGTCCGGTGCCCTGAATGAACTGCAGGACGAGGCAGCGCGGCTA
TCGTGGCTGGCCACGACGGGCGTTCCTTGCGCAGCTGTGCTCGACGTTGTCACT
GAAGCGGGAAGGGACTGGCTGCTATTGGGCGAAGTGCCGGGGCAGGATCTCC
TGTCATCTCACCTTGCTCCTGCCGAGAAAGTATCCATCATGGCTGATGCAATGC
GGCGGCTGCATACGCTTGATCCGGCTACCTGCCCATTCGACCACCAAGCGAAA
CATCGCATCGAGCGAGCACGTACTCGGATGGAAGCCGGTCTTGTCGATCAGGA
TGATCTGGACGAAGAGCATCAGGGGCTCGCGCCAGCCGAACTGTTCGCCAGGC
TCAAGGCGCGCATGCCCGACGGCGAGGATCTCGTCGTGACCCATGGCGATGCC
TGCTTGCCGAATATCATGGTGGAAAATGGCCGCTTTTCTGGATTCATCGACTGT
GGCCGGCTGGGTGTGGCGGACCGCTATCAGGACATAGCGTTGGCTACCCGTGA
TATTGCTGAAGAGCTTGGCGGCGAATGGGCTGACCGCTTCCTCGTGCTTTACGG
TATCGCCGCTCCCGATTCGCAGCGCATCGCCTTCTATCGCCTTCTTGACGAGTT
CTTCTGAGCGGGACTCTGGGGTTCGAAATGACCGACCAAGCGACGCCCAACCT
GCCATCACGAGATTTCGATTCCACCGCCGCCTTCTATGAAAGGTTGGGCTTCGG
AATCGTTTTCCGGGACGCCGGCTGGATGATCCTCCAGCGCGGGGATCTCATGC
TGGAGTTCTTCGCCCACCCCAACTTGTTTATTGCAGCTTATAATGGTTACAAAT
AAAGCAATAGCATCACAAATTTCACAAATAAAGCATTTTTTTCACTGCATTCTA
GTTGTGGTTTGTCCAAACTCATCAATGTATCTTATCATGTCTGTATACCGTCGA
CCTCTAGCTAGAGCTTGGCGTAATCATGGTCATAGCTGTTTCCTGTGTGAAATT
GTTATCCGCTCACAATTCCACACAACATACGAGCCGGAAGCATAAAGTGTAAA
GCCTGGGGTGCCTAATGAGTGAGCTAACTCACATTAATTGCGTTGCGCTCACTG
CCCGCTTTCCAGTCGGGAAACCTGTCGTGCCAGCTGCATTAATGAATCGGCCA
ACGCGCGGGGAGAGGCGGTTTGCGTATTGGGCGCTCTTCCGCTTCCTCGCTCAC
TGACTCGCTGCGCTCGGTCGTTCGGCTGCGGCGAGCGGTATCAGCTCACTCAA
AGGCGGTAATACGGTTATCCACAGAATCAGGGGATAACGCAGGAA
(SEQ ID NO: 583)

### Example 14

[1635] PhyciCas12b (Phycisphaerae bacterium Cas12b) was cloned into a plasmid (pcDNA3-PhyciCas12b). A map of the plasmid is shown in FIG. 29. The sequence of the cloned construct is shown in Table 23 below.

TABLE 23
Sequence of pcDNA3-PhyciCas12b

gacggatcgggagatctcccgatcccctatggtgcactctcagtacaatctgctctgatgccgcatagttaagccagt
atctgctccctgcttgtgtgttggaggtcgctgagtagtgcgcgagcaaaatttaagctacaacaaggcaaggcttga
ccgacaattgcatgaagaatctgcttagggttaggcgttttgcgctgcttcgcgatgtacgggccagatatacgcgtt
gacattgattattgactagttattaatagtaatcaattacggggtcattagttcatagcccatatatggagttccgcg
ttacataacttacggtaaatggcccgcctggctgaccgcccaacgacccccgcccattgacgtcaataatgacgtatg
ttcccatagtaacgccaatagggactttccattgacgtcaatgggtggagtatttacggtaaactgcccacttggcag
tacatcaagtgtatcatatgccaagtacgccccctattgacgtcaatgacggtaaatggcccgcctggcattatgccc
agtacatgaccttatgggactttcctacttggcagtacatctacgtattagtcatcgctattaccatggtgatgcggt
tttggcagtacatcaatgggcgtggatagcggtttgactcacggggatttccaagtctccaccccattgacgtcaatg
ggagtttgttttggcaccaaaatcaacgggactttccaaaatgtcgtaacaactccgccccattgacgcaaatgggcg
gtaggcgtgtacggtgggaggtctatataagcagagctctctggctaactagagaacccactgcttactggcttatcg
aaattaatacgactcactatagggagacccaagctggctagcgtttaaacttaagcttgccacc
ATGGCCCCAAAGAAGAAGCGGAAGGTC
GGTATCCACGGAGTCCCAGCAGCCGCCACCAAGAGCTACAGAGCCAGAATCCT
GACCGACAGCAGACTGGCCGCTGCTCTGGATAGAACCCACGTGGTGTTTGTGG
AAAGCCTGAAGCAGATGATCAACACCTACCTGCGGATGCAGAACGGCAAGTTC
GGCCCCGACCACAAGAAACTGGCCCAGATCATGCTGAGCCGGTCCAACACATT
TGCCCACGGCGTGATGGACCAGATCACCAGAGATCAGCCCACCAGCACACTGG
ACGAGGAATGGACCGACCTGGCCAGAAGAATCCACAAGACAACCGGACCTCT
GTTCCTGCAAGCCGAGAGATTCGCCACCGTGAAGAACAGAGCCATCCACACCA
AGTCCAGAGGCAAAGTGATCCCATCTCCTGAGACACTGGCCGTGCCTGCCAAG
TTCTGGCACCAAGTGTGCGATAGCGCCAGCGCCTACATCAGATCCAACCGCGA
ACTGATGCAGCAGTGGCGGAAAGATAGAGCCGCCTGGCTGAAGGACAAGAAC
GAGTGGCAGCAGAAACACCCCGAGTTCATGCAGTTCTACAACGGCCCCTACCA
GAACTTCCTGAAGCTGTGCGACGACGACAGAATCACCTCTCAGCTGGCTGCCG
AGCAGCAGCCTACAGCCAGCAAGAACAACAGACCCAGAAAGACCGGCAAGCG
CTTCGCCAGATGGCACCTGTGGTACAAGTGGCTGAGCGAGAACCCCGAGATCA
TCGAATGGCGGAACAAGGCCTCCGCCAGCGACTTTAAGACCGTGACCGATGAC
GTGCGGAAGCAGATCATTACCAAGTATCCCCAGCAGAACAAGTACATCACCCG
GCTGCTGGACTGGCTGGAAGATAACAACCCCGAGCTGAAAACCCTGGAAAAC
CTGCGGCGGACCTACGTGAAGAAGTTCGACAGCTTCAAGCGGCCTCCTACACT
GACCCTGCCATCTCCATACAGACACCCCTACTGGTTCACCATGGAACTGGACC
AGTTTTACAAGAAGGCCGACTTCGAGAACGGCACCATCCAGCTGCTGCTGATC
GACGAGGACGACGACGGCAACTGGTTCTTCAACTGGATGCCCGCCTCTCTGAA
GCCCGATCCTAGACTGGTGCCTTCTTGGAGAGCCGAAACCTTCGAGACAGAGG
GCAGATTCCCTCCTTACCTCGGCGGCAAGATCGGCAAGAAGCTGAGCAGACCT
GCTCCTACCGACGCCGAGAGAAAGGCTGGAATTGCCGGCGCTAAGCTGATGAT
TAAGAACAATCGGAGCGAGCTGCTGTTCACCGTGTTCGAGCAGGACTGCCCTC
CTAGAGTGAAGTGGGCCAAGACCAAGAACCGGAAGTGCCCTGCCGACAACGC
CTTTAGCTCCGACGGCAAGACCAGAAAGCCCCTGAGAATCCTGTCCATCGACC
TGGGCATCAGACACATCGGCGCCTTCGCTCTGACACAGGGCACCAGAAATGAT
AGCGCCTGGCAGACCGAGAGCCTGAAGAAGGGCATCATCAACAGCCCTAGCA
TCCCTCCACTGCGGCAAGTGCGGAGACACGACTACGACCTGAAGCGGAAAAG
ACGGCGGCACGGCAAGCCTGTGAAGGGCCAGAGAAGCAACGCCAATCTGCAG
GCCCACAGGACCAACATGGCCCAGGACAGATTCAAGAAGGGCGCCTCTGCCAT
CGTGTCACTGGCCAGAGAGCATAGCGCCGACCTGATCCTGTTCGAGAACCTGC
ACAGCCTGAAGTTCAGCGCCTTCGACGAGCGGTGGATGAACAGACAGCTGCGG
GACATGAACCGGCGGCACATCGTGGAACTGGTGTCTGAACAGGCCCCTGAGTT
CGGCATCACAGTGAAGGACGACATCAACCCCTGGATGACCAGCCGGATCTGCA
GCAACTGTAACCTGCCTGGCTTCAGGTTCAGCATGAAGAAGAAGAACCCCTAC
CGCGAGAAGCTGCCCAGAGAGAAGTGCACCGATTTCGGCTACCCTGTGTGGGA
ACCTGGCGGCCACCTGTTTAGATGCCCTCACTGCGACCACAGAGTGAACGCCG
ACATTAACGCCGCTGCCAACCTGGCCAACAAGTTCTTTGGCCTCGGCTACTGG
AACAACGGCCTGAAGTACGATGCCGAGACAAAGACCTTCACCGTGCACACCG
ACAAGAAAACCCCACCTCTGATCTTCAAGCCCAGACCTCAGTTCGATCTGTGG
GCCGACAGCGTGAAAACACGGAAGCAGCTTGGCCCCGATCCTTTCAAAAGGCC
GGCGGCCACGAAAAAGGCCGGCCAGGCAAAAAAGAAAAAGGGATCCTACCCA
TACGATGTTCCAGATTACGCTTATCCCTACGACGTGCCTGATTATGCATACCCA
TATGATGTCCCCGACTATGCCTAAGaattctgcagatatccagcacagtggcggccgctcgagtctagagg
gcccgtttaaacccgctgatcagcctcgactgtgccttctagttgccagccatctgttgtttgcccctcccccgtgcc
ttccttgaccctggaaggtgccactcccactgtcctttcctaataaaatgaggaaattgcatcgcattgtagagtagg
tgtcattctattctggggggtggggtggggcaggacagcaagggggaggattgggaagacaatagcaggcatgctggg
gatgcggtgggctctatggcttctgaggcggaaagaaccagctggggctctagggggtatccccacgcgccctgtagc
ggcgcattaagcgcggcgggtgtggtggttacgcgcagcgtgaccgctacacttgccagcgccctagcgcccgctcct
ttcgctttcttcccttcctttctcgccacgttcgccggctttccccgtcaagctctaaatcgggggctccctttaggg
ttccgatttagtgctttacggcacctcgaccccaaaaaacttgattagggtgatggttcacgtagtgggccatcgccc
tgatagacggtttttcgccctttgacgttggagtccacgttctttaatagtggactcttgttccaaactggaacaaca
ctcaaccctatctcggtctattcttttgatttataagggattttgccgatttcggcctattggttaaaaaatgagctg
atttaacaaaaatttaacgcgaattaattctgtggaatgtgtgtcagttagggtgtggaaagtccccaggctccccag
caggcagaagtatgcaaagcatgcatctcaattagtcagcaaccaggtgtggaaagtccccaggctccccagcaggca
gaagtatgcaaagcatgcatctcaattagtcagcaaccatagtcccgcccctaactccgcccatcccgcccctaactc
cgcccagttccgcccattctccgccccatggctgactaattttttttatttatgcagaggccgaggccgcctctgcct
ctgagctattccagaagtagtgaggaggcttttttggaggcctaggcttttgcaaaaagctcccgggagcttgtatat
ccattttcggatctgatcaagagacaggatgaggatcgtttcgcatgattgaacaagatggattgcacgcaggttctc
cggccgcttgggtggagaggctattcggctatgactgggcacaacagacaatcggctgctctgatgccgccgtgttcc
ggctgtcagcgcaggggcgcccggttctttttgtcaagaccgacctgtccggtgccctgaatgaactgcaggacgagg
cagcgcggctatcgtggctggccacgacgggcgttccttgcgcagctgtgctcgacgttgtcactgaagcgggaaggg
actggctgctattgggcgaagtgccggggcaggatctcctgtcatctcaccttgctcctgccgagaaagtatccatca
tggctgatgcaatgcggcggctgcatacgcttgatccggctacctgcccattcgaccaccaagcgaaacatcgcatcg
agcgagcacgtactcggatggaagccggtcttgtcgatcaggatgatctggacgaagagcatcaggggctcgcgccag
ccgaactgttcgccaggctcaaggcgcgcatgcccgacggcgaggatctcgtcgtgacccatggcgatgcctgcttgc
cgaatatcatggtggaaaatggccgcttttctggattcatcgactgtggccggctgggtgtggcggaccgctatcagg
acatagcgttggctacccgtgatattgctgaagagcttggcggcgaatgggctgaccgcttcctcgtgctttacggta
tcgccgctcccgattcgcagcgcatcgccttctatcgccttcttgacgagttcttctgagcgggactctggggttcga
aatgaccgaccaagcgacgcccaacctgccatcacgagatttcgattccaccgccgccttctatgaaaggttgggctt
cggaatcgttttccgggacgccggctggatgatcctccagcgcggggatctcatgctggagttcttcgcccaccccaa
cttgtttattgcagcttataatggttacaaataaagcaatagcatcacaaatttcacaaataaagcatttttttcact
gcattctagttgtggtttgtccaaactcatcaatgtatcttatcatgtctgtataccgtcgacctctagctagagctt
ggcgtaatcatggtcatagctgtttcctgtgtgaaattgttatccgctcacaattccacacaacatacgagccggaag
cataaagtgtaaagcctggggtgcctaatgagtgagctaactcacattaattgcgttgcgctcactgcccgctttcca
gtcgggaaacctgtcgtgccagctgcattaatgaatcggccaacgcgcggggagaggcggtttgcgtattgggcgctc
ttccgcttcctcgctcactgactcgctgcgctcggtcgttcggctgcggcgagcggtatcagctcactcaaaggcggt
aatacggttatccacagaatcaggggataacgcaggaaagaacatgtgagcaaaaggccagcaaaaggccaggaaccg
taaaaaggccgcgttgctggcgtttttccataggctccgcccccctgacgagcatcacaaaaatcgacgctcaagtca
gaggtggcgaaacccgacaggactataaagataccaggcgtttccccctggaagctccctcgtgcgctctcctgttcc
gaccctgccgcttaccggatacctgtccgcctttctcccttcgggaagcgtggcgctttctcatagctcacgctgtag
gtatctcagttcggtgtaggtcgttcgctccaagctgggctgtgtgcacgaaccccccgttcagcccgaccgctgcgc
cttatccggtaactatcgtcttgagtccaacccggtaagacacgacttatcgccactggcagcagccactggtaacag
gattagcagagcgaggtatgtaggcggtgctacagagttcttgaagtggtggcctaactacggctacactagaagaac
agtatttggtatctgcgctctgctgaagccagttaccttcggaaaaagagttggtagctcttgatccggcaaacaaac
caccgctggtagcggtttttttgtttgcaagcagcagattacgcgcagaaaaaaaggatctcaagaagatcctttgat
cttttctacggggtctgacgctcagtggaacgaaaactcacgttaagggattttggtcatgagattatcaaaaaggat
cttcacctagatccttttaaattaaaaatgaagttttaaatcaatctaaagtatatatgagtaaacttggtctgacag
ttaccaatgcttaatcagtgaggcacctatctcagcgatctgtctatttcgttcatccatagttgcctgactccccgt
cgtgtagataactacgatacgggagggcttaccatctggccccagtgctgcaatgataccgcgagacccacgctcacc
ggctccagatttatcagcaataaaccagccagccggaagggccgagcgcagaagtggtcctgcaactttatccgcctc
catccagtctattaattgttgccgggaagctagagtaagtagttcgccagttaatagtttgcgcaacgttgttgccat
tgctacaggcatcgtggtgtcacgctcgtcgtttggtatggcttcattcagctccggttcccaacgatcaaggcgagt
tacatgatcccccatgttgtgcaaaaaagcggttagctccttcggtcctccgatcgttgtcagaagtaagttggccgc
agtgttatcactcatggttatggcagcactgcataattctcttactgtcatgccatccgtaagatgcttttctgtgac
tggtgagtactcaaccaagtcattctgagaatagtgtatgcggcgaccgagttgctcttgcccggcgtcaatacggga
taataccgcgccacatagcagaactttaaaagtgctcatcattggaaaacgttcttcggggcgaaaactctcaaggat
cttaccgctgttgagatccagttcgatgtaacccactcgtgcacccaactgatcttcagcatcttttactttcaccag
cgtttctgggtgagcaaaaacaggaaggcaaaatgccgcaaaaaagggaataagggcgacacggaaatgttgaatact
catactcttcctttttcaatattattgaagcatttatcagggttattgtctcatgagcggatacatatttgaatgtat
ttagaaaaataaacaaataggggttccgcgcacatttccccgaaaagtgccacctgacgtc (SEQ ID NO: 584)

### Example 15

[1636] PlancCas12b (Planctomycetes bacterium Cas12b) was cloned into a plasmid (pcDNA3-PancCas12b). A map of the plasmid is shown in FIG. 30. The sequence of the cloned construct is shown in Table 24 below.

TABLE 24
Sequence of pcDNA3-PlancCas12b

gacggatcgggagatctcccgatcccctatggtgcactctcagtacaatctgctctgatgccgcatagttaagccagt
atctgctccctgcttgtgtgttggaggtcgctgagtagtgcgcgagcaaaatttaagctacaacaaggcaaggcttga
ccgacaattgcatgaagaatctgcttagggttaggcgttttgcgctgcttcgcgatgtacgggccagatatacgcgtt
gacattgattattgactagttattaatagtaatcaattacggggtcattagttcatagcccatatatggagttccgcg
ttacataacttacggtaaatggcccgcctggctgaccgcccaacgacccccgcccattgacgtcaataatgacgtatg
ttcccatagtaacgccaatagggactttccattgacgtcaatgggtggagtatttacggtaaactgcccacttggcag
tacatcaagtgtatcatatgccaagtacgccccctattgacgtcaatgacggtaaatggcccgcctggcattatgccc
agtacatgaccttatgggactttcctacttggcagtacatctacgtattagtcatcgctattaccatggtgatgcggt
tttggcagtacatcaatgggcgtggatagcggtttgactcacggggatttccaagtaccaccccattgacgtcaatgg
gagtttgttttggcaccaaaatcaacgggactttccaaaatgtcgtaacaactccgccccattgacgcaaatgggcgg
taggcgtgtacggtgggaggtctatataagcagagctctctggctaactagagaacccactgcttactggcttatcga
aattaatacgactcactatagggagacccaagctggctagcgtttaaacttaagcttgccacc
ATGGCCCCAAAGAAGAAGCGGAAGGTC
GGTATCCACGGAGTCCCAGCAGCCAGCGTGCGGAGCTTTCAGGCCAGAGTGGA
ATGCGACAAGCAGACCATGGAACACCTGTGGCGGACCCACAAGGTGTTCAAC
GAGAGACTGCCCGAGATCATCAAGATCCTGTTCAAGATGAAGCGGGGCGAGT
GCGGCCAGAACGATAAGCAGAAGTCCCTGTACAAGAGCATCAGCCAGAGCAT
CCTGGAAGCCAACGCTCAGAACGCCGACTACCTGCTGAACAGCGTGTCCATCA
AAGGCTGGAAGCCTGGCACCGCCAAGAAGTACAGAAACGCCAGCTTCACCTG
GGCCGACGATGCCGCTAAACTGTCTAGCCAGGGCATCCACGTGTACGACAAGA
AACAGGTGCTGGGCGACCTGCCTGGCATGATGTCTCAGATGGTCTGCAGGCAG
AGCGTGGAAGCCATCTCTGGACACATCGAGCTGACCAAGAAGTGGGAGAAAG
AACACAACGAGTGGCTGAAAGAAAAAGAGAAATGGGAGTCCGAGGACGAGC
ACAAGAAGTATCTGGACCTGCGCGAGAAGTTCGAGCAGTTTGAGCAGAGCATC
GGCGGCAAGATCACCAAGAGAAGAGGCCGGTGGCACCTGTACCTGAAGTGGC
TGAGCGACAACCCTGATTTTGCCGCCTGGCGGGGAAACAAGGCCGTGATCAAT
CCTCTGAGCGAGAAGGCCCAGATCAGGATCAACAAGGCCAAGCCGAACAAGA
AGAACAGCGTCGAGCGGGACGAGTTCTTCAAGGCCAATCCTGAGATGAAGGC
CCTGGACAACCTGCACGGCTACTACGAGCGGAATTTCGTGCGGCGGAGAAAGA
CAAAGAAGAACCCCGACGGCTTCGACCACAAGCCTACCTTCACACTGCCCCAT
CCTACCATCCATCCTCGTTGGTTCGTGTTCAACAAGCCTAAGACAAACCCCGAG
GGCTACCGCAAGCTGATCCTGCCTAAAAAGGCCGGCGATCTGGGCAGCCTGGA
AATGAGACTGCTGACCGGCGAGAAGAACAAGGGCAACTACCCCGACGACTGG
ATCAGCGTGAAGTTTAAGGCCGATCCTCGGCTGAGCCTGATCAGACCCGTGAA
AGGCAGACGGGTTGTGCGGAAGGGCAAAGAGCAGGGCCAGACCAAAGAGAC
AGACAGCTACGAGTTTTTCGACAAGCACCTGAAGAAGTGGCGGCCTGCCAAAC
TGTCTGGCGTGAAGCTGATCTTCCCCGACAAGACACCTAAGGCCGCCTACCTG
TACTTCACCTGTGACATCCCCGACGAGCCCCTGACCGAGACAGCCAAGAAAAT
CCAGTGGCTGGAAACCGGCGACGTGACCAAAAAGGGCAAGAAACGCAAAAAG
AAGGTGCTGCCCCACGGCCTGGTGTCCTGTGCTGTTGATCTGAGCATGCGGAG
AGGCACCACCGGCTTTGCCACACTGTGCAGATACGAGAATGGCAAGATCCACA
TCCTGCGGAGCCGGAACCTGTGGGTCGGATACAAAGAAGGCAAGGGCTGTCA
CCCCTACAGATGGACAGAGGGACCCGACCTGGGACACATTGCCAAGCACAAG
AGAGAGATCAGAATCCTGCGGTCCAAGCGGGGCAAGCCTGTGAAGGGCGAAG
AGAGCCACATCGACCTGCAGAAACACATCGACTACATGGGCGAAGATCGGTTC
AAGAAGGCCGCCAGAACCATCGTGAACTTCGCCCTGAACACCGAGAACGCCG
CCAGCAAGAATGGCTTCTACCCCAGAGCTGACGTGCTGCTGCTGGAAAACCTG
GAAGGACTGATCCCCGATGCCGAGAAAGAGCGGGGCATCAATAGAGCCCTGG
CCGGCTGGAATAGACGGCACCTGGTTGAGCGCGTGATCGAGATGGCCAAGGAT
GCCGGCTTCAAGCGGCGGGTGTTCGAGATCCCACCTTACGGCACAAGCCAAGT
GTGCAGCAAATGTGGCGCCCTGGGCAGAAGATACAGCATCATCAGAGAGAAC
AACCGGCGCGAGATCAGATTCGGCTACGTGGAAAAGCTGTTCGCCTGTCCTAA
CTGCGGCTACTGCGCCAACGCCGATCACAATGCCAGCGTGAACCTGAACCGGC
GGTTCCTGATCGAGGACAGCTTCAAGTCCTACTACGACTGGAAGCGGCTGTCC
GAGAAGAAGCAGAAAGAGGAAATCGAGACAATCGAGTCCAAGCTGATGGATA
AGCTGTGCGCCATGCACAAGATCAGCCGGGGCAGCATCAGCAAGAAAAGGCC
GGCGGCCACGAAAAAGGCCGGCCAGGCAAAAAAGAAAAAGGGATCCTACCCA
TACGATGTTCCAGATTACGCTTATCCCTACGACGTGCCTGATTATGCATACCCA
TATGATGTCCCCGACTATGCCTAAGaattctgcagatatccagcacagtggcggccgctcgagtctagagg
gcccgtttaaacccgctgatcagcctcgactgtgccttctagttgccagccatctgttgtttgcccctcccccgtgcc
ttccttgaccctggaaggtgccactcccactgtcctttcctaataaaatgaggaaattgcatcgcattgtctgagtag
gtgtcattctattctggggggtggggtggggcaggacagcaagggggaggattgggaagacaatagcaggcatgctgg
ggatgcggtgggctctatggcttctgaggcggaaagaaccagaggggctctagggggtatccccacgcgccagtagcg
gcgcattaagcgcggcgggtgtggtggttacgcgcagcgtgaccgctacacttgccagcgccctagcgcccgctcctt
tcgctttcttcccttcctttctcgccacgttcgccggctttccccgtcaagctctaaatcgggggctccctttagggt
tccgatttagtgctttacggcacctcgaccccaaaaaacttgattagggtgatggttcacgtagtgggccatcgccct
gatagacggtttttcgccctttgttcgttggagtccacgttctttaatagtggactcttgttccaaactggaacaaca
ctcaaccctatctcggtctattcttttgatttataagggattttgccgatttcggcctattggttaaaaaatgagctg
atttaacaaaaatttaacgcgaattaattctgtggaatgtgtgtcagttagggtgtggaaagtccccaggctccccag
caggcagaagtatgcaaagcatgcatctcaattagtcagcaaccaggtgtggaaagtccccaggctccccagcaggca
gaagtatgcaaagcatgcatctcaattagtcagcaaccatagtcccgcccctaactccgcccatcccgcccctaactc
cgcccagttccgcccattctccgccccatggctgactaattttttttatttatgcagaggccgaggccgcctctgcct
ctgagctattccagaagtagtgaggaggcttttttggaggcctaggcttttgcaaaaagctcccgggagcttgtatat
ccattttcggatctgatcaagagacaggatgaggatcgtttcgcatgattgaacaagatggattgcacgcaggttctc
cggccgcttgggtggagaggctattcggctatgactgggcacaacagacaatcggctgctctgatgccgccgtgttcc
ggctgtcagcgcaggggcgcccggttctattttgtcaagaccgacctgtccggtgccctgaatgaactgcaggacgag
gcagcgcggctatcgtggctggccacgacgggcgttccttgcgcagctgtgctcgacgttgtcactgaagcgggaagg
gactggctgctattgggcgaagtgccggggcaggatctcctgtcatctcaccttgctcctgccgagaaagtatccatc
atggctgatgcaatgcggcggctgcatacgcttgatccggctacctgcccattcgaccaccaagcgaaacatcgcatc
gagcgagcacgtactcggatggaagccggtcttgtcgatcaggatgatctggacgaagagcatcaggggctcgcgcca
gccgaactgttcgccaggctcaaggcgcgcatgcccgacggcgaggatctcgtcgtgacccatggcgatgcctgcttg
ccgaatatcatggtggaaaatggccgcttttctggattcatcgactgtggccggctgggtgtggcggaccgctatcag
gacatagcgttggctacccgtgatattgctgaagagcttggcggcgaatgggctgaccgcttcctcgtgctttacggt
atcgccgctcccgattcgcagcgcatcgccttctatcgccttcttgacgagttcttctgagcgggactctggggttcg
aaatgaccgaccaagcgacgcccaacctgccatcacgagatttcgattccaccgccgccttctatgaaaggttgggct
tcggaatcgttttccgggacgccggctggatgatcctccagcgcggggatctcatgctggagttcttcgcccacccca
acttgtttattgcagcttataatggttacaaataaagcaatagcatcacaaatttcacaaataaagcatttttttcac
tgcattctagttgtggtttgtccaaactcatcaatgtatcttatcatgtctgtataccgtcgacctctagctagagct
tggcgtaatcatggtcatagctgtttcctgtgtgaaattgttatccgctcacaattccacacaacatacgagccggaa
gcataaagtgtaaagcctggggtgcctaatgagtgagctaactcacattaattgcgttgcgctcactgcccgctttcc
agtcgggaaacctgtcgtgccagctgcattaatgaatcggccaacgcgcggggagaggcggtttgcgtattgggcgct
cttccgcttcctcgctcactgactcgctgcgctcggtcgttcggctgcggcgagcggtatcagctcactcaaaggcgg
taatacggttatccacagaatcaggggataacgcaggaaagaacatgtgagcaaaaggccagcaaaaggccaggaacc
gtaaaaaggccgcgttgctggcgtttttccataggctccgcccccctgacgagcatcacaaaaatcgacgctcaagtc
agaggtggcgaaacccgacaggactataaagataccaggcgtttccccctggaagctccctcgtgcgctctcctgttc
cgaccctgccgcttaccggatacctgtccgcctttctcccttcgggaagcgtggcgctttctcatagctcacgctgta
ggtatctcagttcggtgtaggtcgttcgctccaagctgggctgtgtgcacgaaccccccgttcagcccgaccgctgcg
ccttatccggtaactatcgtcttgagtccaacccggtaagacacgacttatcgccactggcagcagccactggtaaca
ggattagcagagcgaggtatgtaggcggtgctacagagttcttgaagtggtggcctaactacggctacactagaagaa
cagtatttggtatctgcgctctgctgaagccagttaccttcggaaaaagagttggtagctcttgatccggcaaacaaa
ccaccgctggtagcggtttttttgtttgcaagcagcagattacgcgcagaaaaaaaggatctcaagaagatcctttga
tcttttctacggggtctgacgctcagtggaacgaaaactcacgttaagggattttggtcatgagattatcaaaaagga
tcttcacctagatccttttaaattaaaaatgaagttttaaatcaatctaaagtatatatgagtaaacttggtctgaca
gttaccaatgcttaatcagtgaggcacctatctcagcgatctgtctatttcgttcatccatagttgcctgactccccg
tcgtgtagataactacgatacgggagggcttaccatctggccccagtgctgcaatgataccgcgagacccacgctcac
cggctccagatttatcagcaataaaccagccagccggaagggccgagcgcagaagtggtcctgcaactttatccgcct
ccatccagtctattaattgttgccgggaagctagagtaagtagttcgccagttaatagtttgcgcaacgttgttgcca
ttgctacaggcatcgtggtgtcacgctcgtcgtttggtatggcttcattcagctccggttcccaacgatcaaggcgag
ttacatgatcccccatgttgtgcaaaaaagcggttagctccttcggtcctccgatcgttgtcagaagtaagttggccg
cagtgttatcactcatggttatggcagcactgcataattctcttactgtcatgccatccgtaagatgcttttctgtga
ctggtgagtactcaaccaagtcattctgagaatagtgtatgcggcgaccgagttgctcttgcccggcgtcaatacggg
ataataccgcgccacatagcagaactttaaaagtgctcatcattggaaaacgttcttcggggcgaaaactctcaagga
tcttaccgctgttgagatccagttcgatgtaacccactcgtgcacccaactgatcttcagcatcttttactttcacca
gcgtttctgggtgagcaaaaacaggaaggcaaaatgccgcaaaaaagggaataagggcgacacggaaatgttgaatac
tcatactcttcctttttcaatattattgaagcatttatcagggttattgtctcatgagcggatacatatttgaatgta
tttagaaaaataaacaaataggggttccgcgcacatttccccgaaaagtgccacctgacgtc
(SEQ ID NO: 585)

### Example 16

[1637] Plasmid pZ143-pcDNA3-BvCas12b containing BvCas12b was generated. A map of the plasmid is shown in FIG. 31 and the sequence of the cloned construct is shown in Table 25 below.

TABLE 25
Sequence of pZ143-pcDNA3-BvCas12b

AGAACATGTGAGCAAAAGGCCAGCAAAAGGCCAGGAACCGTAAAAAGGCCGCGTTGCTGGCGTTTTTCCATAGGCTCC
GCCCCCCTGACGAGCATCACAAAAATCGACGCTCAAGTCAGAGGTGGCGAAACCCGACAGGACTATAAAGATACCAGG
CGTTTCCCCCTGGAAGCTCCCTCGTGCGCTCTCCTGTTCCGACCCTGCCGCTTACCGGATACCTGTCCGCCTTTCTCC
CTTCGGGAAGCGTGGCGCTTTCTCATAGCTCACGCTGTAGGTATCTCAGTTCGGTGTAGGTCGTTCGCTCCAAGCTGG
GCTGTGTGCACGAACCCCCCGTTCAGCCCGACCGCTGCGCCTTATCCGGTAACTATCGTCTTGAGTCCAACCCGGTAA
GACACGACTTATCGCCACTGGCAGCAGCCACTGGTAACAGGATTAGCAGAGCGAGGTATGTAGGCGGTGCTACAGAGT
TCTTGAAGTGGTGGCCTAACTACGGCTACACTAGAAGAACAGTATTTGGTATCTGCGCTCTGCTGAAGCCAGTTACCT
TCGGAAAAAGAGTTGGTAGCTCTTGATCCGGCAAACAAACCACCGCTGGTAGCGGTGGTTTTTTTGTTTGCAAGCAGC
AGATTACGCGCAGAAAAAAAGGATCTCAAGAAGATCCTTTGATCTTTTCTACGGGGTCTGACGCTCAGTGGAACGAAA
ACTCACGTTAAGGGATTTTGGTCATGAGATTATCAAAAAGGATCTTCACCTAGATCCTTTTAAATTAAAAATGAAGTT
TTAAATCAATCTAAAGTATATATGAGTAAACTTGGTCTGACAGTTACCAATGCTTAATCAGTGAGGCACCTATCTCAG
CGATCTGTCTATTTCGTTCATCCATAGTTGCCTGACTCCCCGTCGTGTAGATAACTACGATACGGGAGGGCTTACCAT
CTGGCCCCAGTGCTGCAATGATACCGCGAGACCCACGCTCACCGGCTCCAGATTTATCAGCAATAAACCAGCCAGCCG
GAAGGGCCGAGCGCAGAAGTGGTCCTGCAACTTTATCCGCCTCCATCCAGTCTATTAATTGTTGCCGGGAAGCTAGAG
TAAGTAGTTCGCCAGTTAATAGTTTGCGCAACGTTGTTGCCATTGCTACAGGCATCGTGGTGTCACGCTCGTCGTTTG
GTATGGCTTCATTCAGCTCCGGTTCCCAACGATCAAGGCGAGTTACATGATCCCCCATGTTGTGCAAAAAAGCGGTTA
GCTCCTTCGGTCCTCCGATCGTTGTCAGAAGTAAGTTGGCCGCAGTGTTATCACTCATGGTTATGGCAGCACTGCATA
ATTCTCTTACTGTCATGCCATCCGTAAGATGCTTTTCTGTGACTGGTGAGTACTCAACCAAGTCATTCTGAGAATAGT
GTATGCGGCGACCGAGTTGCTCTTGCCCGGCGTCAATACGGGATAATACCGCGCCACATAGCAGAACTTTAAAAGTGC
TCATCATTGGAAAACGTTCTTCGGGGCGAAAACTCTCAAGGATCTTACCGCTGTTGAGATCCAGTTCGATGTAACCCA
CTCGTGCACCCAACTGATCTTCAGCATCTTTTACTTTCACCAGCGTTTCTGGGTGAGCAAAAACAGGAAGGCAAAATG
CCGCAAAAAAGGGAATAAGGGCGACACGGAAATGTTGAATACTCATACTCTTCCTTTTTCAATATTATTGAAGCATTT
ATCAGGGTTATTGTCTCATGAGCGGATACATATTTGAATGTATTTAGAAAAATAAACAAATAGGGGTTCCGCGCACAT
TTCCCCGAAAAGTGCCACCTGACGTCGACGGATCGGGAGATCTCCCGATCCCCTATGGTGCACTCTCAGTACAATCTG
CTCTGATGCCGCATAGTTAAGCCAGTATCTGCTCCCTGCTTGTGTGTTGGAGGTCGCTGAGTAGTGCGCGAGCAAAAT
TTAAGCTACAACAAGGCAAGGCTTGACCGACAATTGCATGAAGAATCTGCTTAGGGTTAGGCGTTTTGCGCTGCTTCG
CGATGTACGGGCCAGATATACGCGTTGACATTGATTATTGACTAGTTATTAATAGTAATCAATTACGGGGTCATTAGT
TCATAGCCCATATATGGAGTTCCGCGTTACATAACTTACGGTAAATGGCCCGCCTGGCTGACCGCCCAACGACCCCCG
CCCATTGACGTCAATAATGACGTATGTTCCCATAGTAACGCCAATAGGGACTTTCCATTGACGTCAATGGGTGGAGTA
TTTACGGTAAACTGCCCACTTGGCAGTACATCAAGTGTATCATATGCCAAGTACGCCCCCTATTGACGTCAATGACGG
TAAATGGCCCGCCTGGCATTATGCCCAGTACATGACCTTATGGGACTTTCCTACTTGGCAGTACATCTACGTATTAGT
CATCGCTATTACCATGGTGATGCGGTTTTGGCAGTACATCAATGGGCGTGGATAGCGGTTTGACTCACGGGGATTTCC
AAGTCTCCACCCCATTGACGTCAATGGGAGTTTGTTTTGGCACCAAAATCAACGGGACTTTCCAAAATGTCGTAACAA
CTCCGCCCCATTGACGCAAATGGGCGGTAGGCGTGTACGGTGGGAGGTCTATATAAGCAGAGCTCTCTGGCTAACTAG
AGAACCCACTGCTTACTGGCTTATCGAAATTAATACGACTCACTATAGGGAGACCCAAGCTGGCTAGCGTTTAAACTT
AAGCTTGCCACCATGGCCCCAAAGAAGAAGCGGAAGGTCGGTATCCACGGAGTCCCAGCAGCCGGATCCGCCATCCGG
TCCATCAAGCTGAAGATGAAGACCAACAGCGGCACCGACAGCATCTACCTGAGAAAAGCCCTGTGGCGGACCCACCAG
CTGATCAATGAGGGAATCGCCTACTACATGAACCTGCTGACCCTGTACCGGCAAGAGGCCATCGGCGACAAGACCAAA
GAAGCCTATCAGGCCGAGCTGATTAACATCATCCGGAACCAGCAGCGGAACAACGGCAGCTCTGAGGAACACGGCTCC
GACCAAGAAATTCTGGCCCTGCTGAGACAGCTGTACGAGCTGATCATCCCCAGCAGCATCGGCGAATCTGGCGACGCT
AATCAGCTGGGCAACAAGTTTCTGTACCCTCTGGTGGACCCCAACAGCCAGTCTGGCAAGGGCACATCTAACGCCGGC
AGAAAGCCCAGATGGAAGCGGCTGAAAGAGGAAGGCAACCCCGACTGGGAACTCGAGAAGAAGAAGGACGAGGAACGC
AAGGCCAAGGATCCCACCGTGAAGATCTTTGACAACCTGAACAAATACGGCCTGCTGCCTCTGTTCCCACTGTTCACC
AACATCCAGAAAGACATCGAGTGGCTGCCCCTGGGCAAGAGACAGTCTGTGCGGAAGTGGGACAAAGACATGTTCATC
CAGGCCATCGAGAGACTGCTGAGCTGGGAGAGCTGGAACAGAAGAGTGGCCGACGAGTACAAACAGCTGAAAGAAAAG
ACCGAGAGCTACTACAAAGAGCACCTGACAGGCGGCGAGGAATGGATCGAGAAGATCCGGAAGTTCGAGAAAGAACGG
AACATGGAACTGGAAAAGAACGCCTTCGCTCCCAACGACGGCTACTTCATCACCAGCAGACAGATCAGAGGCTGGGAC
AGAGTGTACGAGAAGTGGTCCAAGCTGCCCGAGTCTGCTAGCCCTGAGGAACTGTGGAAAGTGGTGGCCGAGCAGCAG
AACAAGATGTCCGAAGGCTTCGGCGACCCCAAGGTGTTCAGCTTCCTGGCCAACAGAGAGAACCGGGACATTTGGAGA
GGCCACAGCGAGCGGATCTACCACATTGCCGCCTACAACGGCCTGCAGAAGAAGCTGAGCCGGACCAAAGAGCAGGCC
ACCTTCACACTGCCTGACGCCATTGAACACCCTCTGTGGATCAGATACGAGAGCCCTGGCGGCACCAACCTGAATCTG
TTCAAGCTGGAAGAGAAACAGAAAAAGAACTACTACGTGACCCTGAGCAAGATCATCTGGCCCAGCGAGGAAAAGTGG
ATTGAGAAAGAGAACATCGAGATCCCTCTGGCTCCCAGCATCCAGTTCAACCGGCAGATTAAGCTGAAGCAGCACGTG
AAGGGCAAGCAAGAGATCAGCTTCAGCGACTACAGCAGCCGGATCAGCCTGGATGGTGTTCTCGGCGGCAGCAGAATC
CAGTTTAATCGGAAGTACATCAAGAACCACAAAGAGCTGCTCGGAGAGGGCGACATCGGCCCCGTGTTCTTTAACCTG
GTGGTGGATGTGGCCCCTCTGCAAGAAACCAGAAACGGCAGACTGCAGAGCCCCATCGGCAAGGCCCTGAAAGTGATC
AGCAGCGACTTCTCCAAAGTGATCGACTACAAGCCGAAAGAACTCATGGATTGGATGAATACCGGCAGCGCCAGCAAC
AGCTTTGGAGTGGCTTCTCTGCTGGAAGGCATGAGAGTGATGAGCATCGACATGGGCCAGAGAACCAGCGCCTCCGTG
TCCATCTTCGAGGTCGTGAAAGAACTGCCCAAGGATCAAGAGCAGAAGCTGTTCTACAGCATCAACGACACCGAGCTG
TTCGCCATCCACAAGCGGAGCTTTCTGCTGAACCTGCCTGGCGAGGTGGTCACCAAGAACAACAAGCAGCAGCGGCAA
GAGCGGCGGAAAAAGCGGCAGTTTGTGCGGAGCCAGATCAGAATGCTGGCCAACGTGCTGCGGCTGGAAACAAAGAAA
ACCCCTGACGAGCGGAAGAAGGCCATTCACAAGCTGATGGAAATCGTGCAGAGCTACGACAGCTGGACCGCCAGCCAG
AAAGAAGTGTGGGAGAAAGAGCTGAATCTCCTGACCAACATGGCCGCCTTCAATGACGAGATCTGGAAAGAAAGCCTG
GTGGAACTGCACCACCGGATCGAGCCTTACGTGGGACAGATCGTGTCCAAGTGGCGGAAGGGCCTGTCTGAGGGCAGA
AAGAATCTGGCCGGCATCAGCATGTGGAACATCGACGAACTGGAAGATACCAGGCGGCTGCTGATTTCCTGGTCCAAG
AGAAGCAGAACCCCAGGCGAGGCCAACAGGATCGAAACCGATGAGCCTTTCGGCAGCAGCCTGCTCCAGCACATTCAG
AACGTGAAGGACGACAGACTGAAGCAGATGGCCAACCTGATCATCATGACAGCCCTGGGCTTTAAGTACGACAAAGAG
GAAAAGGACCGGTACAAGCGGTGGAAAGAGACATACCCCGCCTGCCAGATCATCCTGTTCGAGAACCTGAACCGCTAC
CTGTTCAACCTCGACCGGTCCAGACGCGAGAACAGCAGACTGATGAAGTGGGCCCATCGGAGCATCCCCAGAACCGTG
TCTATGCAGGGCGAGATGTTCGGCCTGCAAGTGGGCGACGTTCGGAGCGAGTACAGCTCCAGATTCCACGCCAAAACA
GGCGCCCCTGGCATCAGATGTCACGCCCTGACTGAAGAGGATCTGAAGGCCGGCAGCAACACCCTGAAGAGACTGATC
GAGGACGGCTTCATCAATGAGAGCGAGCTGGCCTACCTGAAGAAGGGCGATATCATCCCTAGCCAAGGCGGCGAACTG
TTCGTGACACTGTCCAAGCGGTACAAGAAGGACAGCGACAACAACGAGCTGACCGTGATCCACGCCGACATCAACGCC
GCTCAGAATCTGCAGAAGCGGTTTTGGCAGCAAAACAGCGAGGTGTACAGAGTGCCCTGTCAGCTGGCCAGAATGGGC
GAAGATAAGCTGTACATCCCCAAGAGCCAGACCGAGACAATCAAGAAGTATTTCGGCAAGGGCTCCTTCGTGAAGAAC
AATACCGAACAAGAGGTCTACAAGTGGGAGAAGTCCGAGAAAATGAAGATCAAGACGGACACCACCTTCGACCTGCAA
GACCTGGATGGCTTCGAGGACATCAGCAAGACCATTGAGCTGGCACAAGAGCAGCAAAAGAAATACCTGACCATGTTC
AGGGACCCCAGCGGCTACTTTTTCAACAATGAGACATGGCGGCCTCAAAAAGAATACTGGTCCATCGTGAACAACATC
ATCAAGAGCTGCCTCAAGAAGAAGATCCTGAGCAACAAGGTCGAGCTGGGATCCAAAAGGCCGGCGGCCACGAAAAAG
GCCGGCCAGGCAAAAAAGAAAAAGggatctTACCCATACGATGTTCCAGATTACGCTTATCCCTACGACGTGCCTGAT
TATGCATACCCATATGATGTCCCCGACTATGCCtaaGAATTCTGCAGATATCCAGCACAGTGGCGGCCGCTCGAGTCT
AGAGGGCCCGTTTAAACCCGCTGATCAGCCTCGACTGTGCCTTCTAGTTGCCAGCCATCTGTTGTTTGCCCCTCCCCC
GTGCCTTCCTTGACCCTGGAAGGTGCCACTCCCACTGTCCTTTCCTAATAAAATGAGGAAATTGCATCGCATTGTCTG
AGTAGGTGTCATTCTATTCTGGGGGGTGGGGTGGGGCAGGACAGCAAGGGGGAGGATTGGGAAGACAATAGCAGGCAT
GCTGGGGATGCGGTGGGCTCTATGGCTTCTGAGGCGGAAAGAACCAGCTGGGGCTCTAGGGGGTATCCCCACGCGCCC
TGTAGCGGCGCATTAAGCGCGGCGGGTGTGGTGGTTACGCGCAGCGTGACCGCTACACTTGCCAGCGCCCTAGCGCCC
GCTCCTTTCGCTTTCTTCCCTTCCTTTCTCGCCACGTTCGCCGGCTTTCCCCGTCAAGCTCTAAATCGGGGGCTCCCT
TTAGGGTTCCGATTTAGTGCTTTACGGCACCTCGACCCCAAAAAACTTGATTAGGGTGATGGTTCACGTAGTGGGCCA
TCGCCCTGATAGACGGTTTTTCGCCCTTTGACGTTGGAGTCCACGTTCTTTAATAGTGGACTCTTGTTCCAAACTGGA
ACAACACTCAACCCTATCTCGGTCTATTCTTTTGATTTATAAGGGATTTTGCCGATTTCGGCCTATTGGTTAAAAAAT
GAGCTGATTTAACAAAAATTTAACGCGAATTAATTCTGTGGAATGTGTGTCAGTTAGGGTGTGGAAAGTCCCCAGGCT
CCCCAGCAGGCAGAAGTATGCAAAGCATGCATCTCAATTAGTCAGCAACCAGGTGTGGAAAGTCCCCAGGCTCCCCAG
CAGGCAGAAGTATGCAAAGCATGCATCTCAATTAGTCAGCAACCATAGTCCCGCCCCTAACTCCGCCCATCCCGCCCC
TAACTCCGCCCAGTTCCGCCCATTCTCCGCCCCATGGCTGACTAATTTTTTTTATTTATGCAGAGGCCGAGGCCGCCT
CTGCCTCTGAGCTATTCCAGAAGTAGTGAGGAGGCTTTTTTGGAGGCCTAGGCTTTTGCAAAAAGCTCCCGGGAGCTT
GTATATCCATTTTCGGATCTGATCAAGAGACAGGATGAGGATCGTTTCGCATGATTGAACAAGATGGATTGCACGCAG
GTTCTCCGGCCGCTTGGGTGGAGAGGCTATTCGGCTATGACTGGGCACAACAGACAATCGGCTGCTCTGATGCCGCCG
TGTTCCGGCTGTCAGCGCAGGGGCGCCCGGTTCTTTTTGTCAAGACCGACCTGTCCGGTGCCCTGAATGAACTGCAGG
ACGAGGCAGCGCGGCTATCGTGGCTGGCCACGACGGGCGTTCCTTGCGCAGCTGTGCTCGACGTTGTCACTGAAGCGG
GAAGGGACTGGCTGCTATTGGGCGAAGTGCCGGGGCAGGATCTCCTGTCATCTCACCTTGCTCCTGCCGAGAAAGTAT
CCATCATGGCTGATGCAATGCGGCGGCTGCATACGCTTGATCCGGCTACCTGCCCATTCGACCACCAAGCGAAACATC
GCATCGAGCGAGCACGTACTCGGATGGAAGCCGGTCTTGTCGATCAGGATGATCTGGACGAAGAGCATCAGGGGCTCG
CGCCAGCCGAACTGTTCGCCAGGCTCAAGGCGCGCATGCCCGACGGCGAGGATCTCGTCGTGACCCATGGCGATGCCT
GCTTGCCGAATATCATGGTGGAAAATGGCCGCTTTTCTGGATTCATCGACTGTGGCCGGCTGGGTGTGGCGGACCGCT
ATCAGGACATAGCGTTGGCTACCCGTGATATTGCTGAAGAGCTTGGCGGCGAATGGGCTGACCGCTTCCTCGTGCTTT
ACGGTATCGCCGCTCCCGATTCGCAGCGCATCGCCTTCTATCGCCTTCTTGACGAGTTCTTCTGAGCGGGACTCTGGG
GTTCGAAATGACCGACCAAGCGACGCCCAACCTGCCATCACGAGATTTCGATTCCACCGCCGCCTTCTATGAAAGGTT
GGGCTTCGGAATCGTTTTCCGGGACGCCGGCTGGATGATCCTCCAGCGCGGGGATCTCATGCTGGAGTTCTTCGCCCA
CCCCAACTTGTTTATTGCAGCTTATAATGGTTACAAATAAAGCAATAGCATCACAAATTTCACAAATAAAGCATTTTT
TTCACTGCATTCTAGTTGTGGTTTGTCCAAACTCATCAATGTATCTTATCATGTCTGTATACCGTCGACCTCTAGCTA
GAGCTTGGCGTAATCATGGTCATAGCTGTTTCCTGTGTGAAATTGTTATCCGCTCACAATTCCACACAACATACGAGC
CGGAAGCATAAAGTGTAAAGCCTGGGGTGCCTAATGAGTGAGCTAACTCACATTAATTGCGTTGCGCTCACTGCCCGC
TTTCCAGTCGGGAAACCTGTCGTGCCAGCTGCATTAATGAATCGGCCAACGCGCGGGGAGAGGCGGTTTGCGTATTGG
GCGCTCTTCCGCTTCCTCGCTCACTGACTCGCTGCGCTCGGTCGTTCGGCTGCGGCGAGCGGTATCAGCTCACTCAAA
GGCGGTAATACGGTTATCCACAGAATCAGGGGATAACGCAGGAA (SEQ ID NO: 586)

[1638] Plasmid pZ147-BvCas12b-sgRNA-scaffold containing BvCas12b sgRNA scaffold was generated. A map of the plasmid is shown in FIG. 32 and the sequence of the cloned construct is shown in Table 26 below.

TABLE 26
Sequence of pZ147-BvCas12b-sgRNA-scaffold

accttgacctgccgagaaagtatccatcatggctgatgcaatgcggcggc
tgcatacgcttgatccggctacctgcccattcgaccaccaagcgaaacat
cgcatcgagcgagcacgtactcggatggaagccggtatgtcgatcaggat
gatctggacgaagagcatcaggggctcgcgccagccgaactgttcgccag
gctcaaggcgcgcatgcccgacggcgaggatctcgtcgtgacccatggcg
atgcctgatgccgaatatcatggtggaaaatggccgatttctggattcat
cgactgtggccggctgggtgtggcggaccgctatcaggacatagcgttgg
ctacccgtgatattgctgaagagcttggcggcgaatgggctgaccgcttc
ctcgtgattacggtatcgccgctcccgattcgcagcgcatcgcatctatc
gccttatgacgagttatctgagcgggactaggggttcgaaatgaccgacc
aagcgacgcccaacctgccatcacgagatttcgattccaccgccgcatct
atgaaaggttgggatcggaatcgttttccgggacgccggctggatgatcc
tccagcgcggggatacatgctggagttcttcgcccaccccaacttgttta
ttgcagatataatggttacaaataaagcaatagcatcacaaatttcacaa
ataaagcatttttttcactgcattctagttgtggtttgtccaaactcatc
aatgtatcttatcatgtagtataccgtcgacactagctagagcttggcgt
aatcatggtcatagagtttcctgtgtgaaattgttatccgctcacaattc
cacacaacatacgagccggaagcataaagtgtaaagcctggggtgcctaa
tgagtgagctaactcacattaattgcgttgcgctcactgcccgattccag
tcgggaaacctgtcgtgccagagcattaatgaatcggccaacgcgcgggg
agaggcggtttgcgtattgggcgctatccgatcctcgctcactgactcgc
tgcgctcggtcgttcggctgcggcgagcggtatcagctcactcaaaggcg
gtaatacggttatccacagaatcaggggataacgcaggaaagaacatgtg
agcaaaaggccagcaaaaggccaggaaccgtaaaaaggccgcgttgctgg
cgtttttccataggctccgcccccctgacgagcatcacaaaaatcgacgc
tcaagtcagaggtggcgaaacccgacaggactataaagataccaggcgtt
tccccctggaagctccctcgtgcgctctcctgttccgaccctgccgctta
ccggatacctgtccgcctttctccatcgggaagcgtggcgctttctcata
gctcacgctgtaggtatctcagttcggtgtaggtcgttcgctccaagctg
ggctgtgtgcacgaaccccccgttcagcccgaccgctgcgccttatccgg
taactatcgtatgagtccaacccggtaagacacgacttatcgccactggc
agcagccactggtaacaggattagcagagcgaggtatgtaggcggtgcta
cagagttcttgaagtggtggcctaactacggctacactagaagaacagta
tttggtatctgcgctctgctgaagccagttaccttcggaaaaagagttgg
tagctcttgatccggcaaacaaaccaccgctggtagcggtttttttgttt
gcaagcagcagattacgcgcagaaaaaaaggatctcaagaagatcctttg
atcttttctacggggtctgacgctcagtggaacgaaaactcacgttaagg
gattttggtcatgagattatcaaaaaggatcttcacctagatccttttaa
attaaaaatgaagttttaaatcaatctaaagtatatatgagtaaacttgg
tctgacagttaccaatgcttaatcagtgaggcacctatctcagcgatctg
tctatttcgttcatccatagttgcctgactccccgtcgtgtagataacta
cgatacgggagggcttaccatctggccccagtgctgcaatgataccgcga
gacccacgctcaccggctccagatttatcagcaataaaccagccagccgg
aagggccgagcgcagaagtggtcctgcaactttatccgcctccatccagt
ctattaattgttgccgggaagctagagtaagtagttcgccagttaatagt
ttgcgcaacgttgttgccattgctacaggcatcgtggtgtcacgctcgtc
gtttggtatggcttcattcagctccggttcccaacgatcaaggcgagtta
catgatcccccatgttgtgcaaaaaagcggttagctccttcggtcctccg
atcgttgtcagaagtaagttggccgcagtgttatcactcatggttatggc
agcactgcataattctatactgtcatgccatccgtaagatgcttttctgt
gactggtgagtactcaaccaagtcattctgagaatagtgtatgcggcgac
cgagttgctcttgcccggcgtcaatacgggataataccgcgccacatagc
agaactttaaaagtgctcatcattggaaaacgttatcggggcgaaaactc
tcaaggatcttaccgctgttgagatccagttcgatgtaacccactcgtgc
acccaactgatcttcagcatcttttactttcaccagcgtttctgggtgag
caaaaacaggaaggcaaaatgccgcaaaaaagggaataagggcgacacgg
aaatgttgaatactcatactatcattttcaatattattgaagcatttatc
agggttattgtctcatgagcggatacatatttgaatgtatttagaaaaat
aaacaaataggggttccgcgcacatttccccgaaaagtgccacctgacgt
cgacggatcgggagatctcccgatcccctatggtgcactctcagtacaat
ctgctctgatgccgcatagttaagccagtatctgctccctgcttgtgtgt
tggaggtcgctgagtagtgcgcgagcaaaatttaagctacaacaaggcaa
ggcttgaccgacTTAATTAAgagggcctatttcccatgattccttcatat
ttgcatatacgatacaaggctgttagagagataattggaattaatttgac
tgtaaacacaaagatattagtacaaaatacgtgacgtagaaagtaataat
ttatgggtagtttgcagttttaaaattatgttttaaaatggactatcata
tgcttaccgtaacttgaaagtatttcgatttatggattatatatcttgtg
gaaaggacgaaacaccgGACCTATAGGGTCAATGAATCTGTGCGTGTGCC
ATAAGTAATTAAAAATTACCCACCACAGGAGCACCTGAAAACAGGTGCTT
GGCACggagacgatatatcgtctattttttcaattgcatgaagaatctga
tagggttaggcgttttgcgctgcttcgcgatgtacgggccagatatacgc
gttgacattgattattgactagttattaatagtaatcaattacggggtca
ttagttcatagcccatatatggagttccgcgttacataacttacggtaaa
tggcccgcctggctgaccgcccaacgacccccgcccattgacgtcaataa
tgacgtatgttcccatagtaacgccaatagggactttccattgacgtcaa
tgggtggagtatttacggtaaactgcccacttggcagtacatcaagtgta
tcatatgccaagtacgccccctattgacgtcaatgacggtaaatggcccg
cctggcattatgcccagtacatgaccttatgggactttcctacttggcag
tacatctacgtattagtcatcgctattaccatggtgatgcggttttggca
gtacatcaatgggcgtggatagcggtttgactcacggggatttccaagtc
tccaccccattgacgtcaatgggagtttgttttggcaccaaaatcaacgg
gactttccaaaatgtcgtaacaactccgccccattgacgcaaatgggcgg
taggcgtgtacggtgggaggtctatataagcagagctctctggctaacta
gagaacccactgcttactggcttatcgaaattaatacgactcactatagg
gagacccaagctggctagcgtttaaacttaAGCTTGCCGGTgccaccatg
GTGAGCAAGGGCGAGGAGGATAACATGGCCATCATCAAGGAGTTCATGCG
CTTCAAGGTGCACATGGAGGGCTCCGTGAACGGCCACGAGTTCGAGATCG
AGGGCGAGGGCGAGGGCCGCCCCTACGAGGGCACCCAGACCGCCAAGCTG
AAGGTGACCAAGGGTGGCCCCCTGCCCTTCGCCTGGGACATCCTGTCCCC
TCAGTTCATGTACGGCTCCAAGGCCTACGTGAAGCACCCCGCCGACATCC
CCGACTACTTGAAGCTGTCCTTCCCCGAGGGCTTCAAGTGGGAGCGCGTG
ATGAACTTCGAGGACGGCGGCGTGGTGACCGTGACCCAGGACTCCTCCCT
GCAGGACGGCGAGTTCATCTACAAGGTGAAGCTGCGCGGCACCAACTTCC
CCTCCGACGGCCCCGTAATGCAGAAGAAGACCATGGGCTGGGAGGCCTCC
TCCGAGCGGATGTACCCCGAGGACGGCGCCCTGAAGGGCGAGATCAAGCA
GAGGCTGAAGCTGAAGGACGGCGGCCACTACGACGCTGAGGTCAAGACCA
CCTACAAGGCCAAGAAGCCCGTGCAGCTGCCCGGCGCCTACAACGTCAAC
ATCAAGTTGGACATCACCTCCCACAACGAGGACTACACCATCGTGGAACA
GTACGAACGCGCCGAGGGCCGCCACTCCACCGGCGGCATGGACGAGCTGT
ACAAGtacccatacgatgttccagattacgctTAAGaattctgcagatat
ccagcacagtggcggccgctcgagtctagagggcccgtttaaacccgctg
atcagcctcgactgtgccttctagttgccagccatctgttgtttgcccct
cccccgtgccttccttgaccctggaaggtgccactcccactgtcctttcc
taataaaatgaggaaattgcatcgcattgtctgagtaggtgtcattctat
tctggggggtggggtggggcaggacagcaagggggaggattgggaagaca
atagcaggcatgctggggatgcggtgggctctatggcttctgaggcggaa
agaaccagctggggctctagggggtatccccacgcgccctgtagcggcgc
attaagcgcggcgggtgtggtggttacgcgcagcgtgaccgctacacttg
ccagcgccctagcgcccgctcctttcgctttcttcccttcctttctcgcc
acgttcgccggattccccgtcaagctctaaatcgggggctccattagggt
tccgatttagtgattacggcacctcgaccccaaaaaacttgattagggtg
atggttcacgtagtgggccatcgccctgatagacggtttttcgccctttg
acgttggagtccacgttctttaatagtggactcttgttccaaactggaac
aacactcaaccctatctcggtctattcttttgatttataagggattttgc
cgatttcggcctattggttaaaaaatgagctgatttaacaaaaatttaac
gcgaattaattctgtggaatgtgtgtcagttagggtgtggaaagtcccca
ggctccccagcaggcagaagtatgcaaagcatgcatctcaattagtcagc
aaccaggtgtggaaagtccccaggctccccagcaggcagaagtatgcaaa
gcatgcatctcaattagtcagcaaccatagtcccgcccctaactccgccc
atcccgcccctaactccgcccagttccgcccattctccgccccatggctg
actaattttttttatttatgcagaggccgaggccgcctctgcctctgagc
tattccagaagtagtgaggaggcttttttggaggcctaggcttttgcaaa
aagctcccgggagcttgtatatccattttcggatctgatcaagagacagg
atgaggatcgtttcgcatgattgaacaagatggattgcacgcaggttctc
cggccgcttgggtggagaggctattcggctatgactgggcacaacagaca
atcggctgctctgatgccgccgtgttccggctgtcagcgcaggggcgccc
ggttattttgtcaagaccgacctgtccggtgccctgaatgaactgcagga
cgaggcagcgcggctatcgtggctggccacgacgggcgttccttgcgcag
ctgtgctcgacgttgtcactgaagcgggaagggactggctgctattgggc
gaagtgccggggcaggatctcctgtcatctc (SEQ ID NO: 587)

### Example 17

[1639] Plasmid pZ148-BhCas12b-sgRNA-scaffold containing BhCas12b sgRNA scaffold was generated. A map of the plasmid is shown in FIG. 33 and the sequence of the cloned construct is shown in Table 27 below.

TABLE 27
Sequence of pZ148-BhCas12b-sgRNA-scaffold

accttgacctgccgagaaagtatccatcatggctgatgcaatgcggcggc
tgcatacgcttgatccggctacctgcccattcgaccaccaagcgaaacat
cgcatcgagcgagcacgtactcggatggaagccggtatgtcgatcaggat
gatctggacgaagagcatcaggggctcgcgccagccgaactgttcgccag
gctcaaggcgcgcatgcccgacggcgaggatctcgtcgtgacccatggcg
atgcctgatgccgaatatcatggtggaaaatggccgatttctggattcat
cgactgtggccggctgggtgtggcggaccgctatcaggacatagcgttgg
ctacccgtgatattgctgaagagcttggcggcgaatgggctgaccgcttc
ctcgtgattacggtatcgccgctcccgattcgcagcgcatcgcatctatc
gccttatgacgagttatctgagcgggactaggggttcgaaatgaccgacc
aagcgacgcccaacctgccatcacgagatttcgattccaccgccgcatct
atgaaaggttgggatcggaatcgttttccgggacgccggctggatgatcc
tccagcgcggggatacatgctggagttcttcgcccaccccaacttgttta
ttgcagatataatggttacaaataaagcaatagcatcacaaatttcacaa
ataaagcatttttttcactgcattctagttgtggtttgtccaaactcatc
aatgtatcttatcatgtagtataccgtcgacactagctagagcttggcgt
aatcatggtcatagagtttcctgtgtgaaattgttatccgctcacaattc
cacacaacatacgagccggaagcataaagtgtaaagcctggggtgcctaa
tgagtgagctaactcacattaattgcgttgcgctcactgcccgattccag
tcgggaaacctgtcgtgccagagcattaatgaatcggccaacgcgcgggg
agaggcggtttgcgtattgggcgctatccgatcctcgctcactgactcgc
tgcgctcggtcgttcggctgcggcgagcggtatcagctcactcaaaggcg
gtaatacggttatccacagaatcaggggataacgcaggaaagaacatgtg
agcaaaaggccagcaaaaggccaggaaccgtaaaaaggccgcgttgctgg
cgtttttccataggctccgcccccctgacgagcatcacaaaaatcgacgc
tcaagtcagaggtggcgaaacccgacaggactataaagataccaggcgtt
tccccctggaagctccctcgtgcgctctcctgttccgaccctgccgctta
ccggatacctgtccgcctttctccatcgggaagcgtggcgctttctcata
gctcacgctgtaggtatctcagttcggtgtaggtcgttcgctccaagctg
ggctgtgtgcacgaaccccccgttcagcccgaccgctgcgccttatccgg
taactatcgtatgagtccaacccggtaagacacgacttatcgccactggc
agcagccactggtaacaggattagcagagcgaggtatgtaggcggtgcta
cagagttcttgaagtggtggcctaactacggctacactagaagaacagta
tttggtatctgcgctctgctgaagccagttaccttcggaaaaagagttgg
tagctcttgatccggcaaacaaaccaccgctggtagcggtttttttgttt
gcaagcagcagattacgcgcagaaaaaaaggatctcaagaagatcctttg
atcttttctacggggtctgacgctcagtggaacgaaaactcacgttaagg
gattttggtcatgagattatcaaaaaggatcttcacctagatccttttaa
attaaaaatgaagttttaaatcaatctaaagtatatatgagtaaacttgg
tctgacagttaccaatgcttaatcagtgaggcacctatctcagcgatctg
tctatttcgttcatccatagttgcctgactccccgtcgtgtagataacta
cgatacgggagggcttaccatctggccccagtgctgcaatgataccgcga
gacccacgctcaccggctccagatttatcagcaataaaccagccagccgg
aagggccgagcgcagaagtggtcctgcaactttatccgcctccatccagt
ctattaattgttgccgggaagctagagtaagtagttcgccagttaatagt
ttgcgcaacgttgttgccattgctacaggcatcgtggtgtcacgctcgtc
gtttggtatggcttcattcagctccggttcccaacgatcaaggcgagtta
catgatcccccatgttgtgcaaaaaagcggttagctccttcggtcctccg
atcgttgtcagaagtaagttggccgcagtgttatcactcatggttatggc
agcactgcataattctatactgtcatgccatccgtaagatgcttttctgt
gactggtgagtactcaaccaagtcattctgagaatagtgtatgcggcgac
cgagttgctcttgcccggcgtcaatacgggataataccgcgccacatagc
agaactttaaaagtgctcatcattggaaaacgttatcggggcgaaaactc
tcaaggatcttaccgctgttgagatccagttcgatgtaacccactcgtgc
acccaactgatcttcagcatcttttactttcaccagcgtttctgggtgag
caaaaacaggaaggcaaaatgccgcaaaaaagggaataagggcgacacgg
aaatgttgaatactcatactatcattttcaatattattgaagcatttatc
agggttattgtctcatgagcggatacatatttgaatgtatttagaaaaat
aaacaaataggggttccgcgcacatttccccgaaaagtgccacctgacgt
cgacggatcgggagatctcccgatcccctatggtgcactctcagtacaat
ctgctctgatgccgcatagttaagccagtatctgctccctgcttgtgtgt
tggaggtcgctgagtagtgcgcgagcaaaatttaagctacaacaaggcaa
ggcttgaccgacTTAATTAAgagggcctatttcccatgattccttcatat
ttgcatatacgatacaaggctgttagagagataattggaattaatttgac
tgtaaacacaaagatattagtacaaaatacgtgacgtagaaagtaataat
ttatgggtagtttgcagttttaaaattatgttttaaaatggactatcata
tgcttaccgtaacttgaaagtatttcgatttatggattatatatcttgtg
gaaaggacgaaacaccgGTTCTGTCTTTTGGTCAGGACAACCGTCTAGCT
ATAAGTGCTGCAGGGTGTGAGAAACTCCTATTGCTGGACGATGTCTCTTA
CGAGGCATTAGCACggagacgatatatcgtctattttttcaattgcatga
agaatctgatagggttaggcgttttgcgctgatcgcgatgtacgggccag
atatacgcgttgacattgattattgactagttattaatagtaatcaatta
cggggtcattagttcatagcccatatatggagttccgcgttacataactt
acggtaaatggcccgcctggctgaccgcccaacgacccccgcccattgac
gtcaataatgacgtatgttcccatagtaacgccaatagggactttccatt
gacgtcaatgggtggagtatttacggtaaactgcccacttggcagtacat
caagtgtatcatatgccaagtacgccccctattgacgtcaatgacggtaa
atggcccgcctggcattatgcccagtacatgaccttatgggactttccta
cttggcagtacatctacgtattagtcatcgctattaccatggtgatgcgg
ttttggcagtacatcaatgggcgtggatagcggtttgactcacggggatt
tccaagtctccaccccattgacgtcaatgggagtttgttttggcaccaaa
atcaacgggactttccaaaatgtcgtaacaactccgccccattgacgcaa
atgggcggtaggcgtgtacggtgggaggtctatataagcagagctctctg
gctaactagagaacccactgcttactggcttatcgaaattaatacgactc
actatagggagacccaagctggctagcgtttaaacttaAGCTTGCCGGTg
ccaccatgGTGAGCAAGGGCGAGGAGGATAACATGGCCATCATCAAGGAG
TTCATGCGCTTCAAGGTGCACATGGAGGGCTCCGTGAACGGCCACGAGTT
CGAGATCGAGGGCGAGGGCGAGGGCCGCCCCTACGAGGGCACCCAGACCG
CCAAGCTGAAGGTGACCAAGGGTGGCCCCCTGCCCTTCGCCTGGGACATC
CTGTCCCCTCAGTTCATGTACGGCTCCAAGGCCTACGTGAAGCACCCCGC
CGACATCCCCGACTACTTGAAGCTGTCCTTCCCCGAGGGCTTCAAGTGGG
AGCGCGTGATGAACTTCGAGGACGGCGGCGTGGTGACCGTGACCCAGGAC
TCCTCCCTGCAGGACGGCGAGTTCATCTACAAGGTGAAGCTGCGCGGCAC
CAACTTCCCCTCCGACGGCCCCGTAATGCAGAAGAAGACCATGGGCTGGG
AGGCCTCCTCCGAGCGGATGTACCCCGAGGACGGCGCCCTGAAGGGCGAG
ATCAAGCAGAGGCTGAAGCTGAAGGACGGCGGCCACTACGACGCTGAGGT
CAAGACCACCTACAAGGCCAAGAAGCCCGTGCAGCTGCCCGGCGCCTACA
ACGTCAACATCAAGTTGGACATCACCTCCCACAACGAGGACTACACCATC
GTGGAACAGTACGAACGCGCCGAGGGCCGCCACTCCACCGGCGGCATGGA
CGAGCTGTACAAGtacccatacgatgttccagattacgctTAAGaattct
gcagatatccagcacagtggcggccgctcgagtctagagggcccgtttaa
acccgctgatcagcctcgactgtgccttctagttgccagccatctgttgt
ttgcccctcccccgtgccttccttgaccctggaaggtgccactcccactg
tcctttcctaataaaatgaggaaattgcatcgcattgtctgagtaggtgt
cattctattctggggggtggggtggggcaggacagcaagggggaggattg
ggaagacaatagcaggcatgctggggatgcggtgggctctatggcttctg
aggcggaaagaaccagctggggctctagggggtatccccacgcgccctgt
agcggcgcattaagcgcggcgggtgtggtggttacgcgcagcgtgaccgc
tacacttgccagcgccctagcgcccgctcctttcgctttcttccatcatt
ctcgccacgttcgccggattccccgtcaagctctaaatcgggggctccct
ttagggttccgatttagtgctttacggcacctcgaccccaaaaaacttga
ttagggtgatggttcacgtagtgggccatcgccctgatagacggtttttc
gccctttgacgttggagtccacgttctttaatagtggactcttgttccaa
actggaacaacactcaaccctatctcggtctattcttttgatttataagg
gattttgccgatttcggcctattggttaaaaaatgagctgatttaacaaa
aatttaacgcgaattaattctgtggaatgtgtgtcagttagggtgtggaa
agtccccaggctccccagcaggcagaagtatgcaaagcatgcatctcaat
tagtcagcaaccaggtgtggaaagtccccaggctccccagcaggcagaag
tatgcaaagcatgcatctcaattagtcagcaaccatagtcccgcccctaa
ctccgcccatcccgcccctaactccgcccagttccgcccattctccgccc
catggctgactaattttttttatttatgcagaggccgaggccgcctctgc
ctctgagctattccagaagtagtgaggaggcttttttggaggcctaggct
tttgcaaaaagctcccgggagcttgtatatccattttcggatctgatcaa
gagacaggatgaggatcgtttcgcatgattgaacaagatggattgcacgc
aggttctccggccgcttgggtggagaggctattcggctatgactgggcac
aacagacaatcggctgctctgatgccgccgtgttccggctgtcagcgcag
gggcgcccggttctttttgtcaagaccgacctgtccggtgccctgaatga
actgcaggacgaggcagcgcggctatcgtggctggccacgacgggcgttc
cttgcgcagctgtgctcgacgttgtcactgaagcgggaagggactggctg
ctattgggcgaagtgccggggcaggatctcctgtcatctc
(SEQ ID NO: 588)

[1640] Plasmid pZ149-BhCas12b-S893R-K846R-E836G containing BhCas12b with mutations at S893, K846, and E836 was generated. A map of the plasmid is shown in FIG. 34 and the sequence of the cloned construct is shown in Table 28 below.

TABLE 28
Sequence of pcDNA3-PlancCas12b

AGAACATGTGAGCAAAAGGCCAGCAAAAGGCCAGGAACCGTAAAAAGGCCGCGTTGCTGGCGTTTTTCCATAGGC
TCCGCCCCCCTGACGAGCATCACAAAAATCGACGCTCAAGTCAGAGGTGGCGAAACCCGACAGGACTATAAAGAT
ACCAGGCGTTTCCCCCTGGAAGCTCCCTCGTGCGCTCTCCTGTTCCGACCCTGCCGCTTACCGGATACCTGTCCG
CCTTTCTCCCTTCGGGAAGCGTGGCGCTTTCTCATAGCTCACGCTGTAGGTATCTCAGTTCGGTGTAGGTCGTTC
GCTCCAAGCTGGGCTGTGTGCACGAACCCCCCGTTCAGCCCGACCGCTGCGCCTTATCCGGTAACTATCGTCTTG
AGTCCAACCCGGTAAGACACGACTTATCGCCACTGGCAGCAGCCACTGGTAACAGGATTAGCAGAGCGAGGTATG
TAGGCGGTGCTACAGAGTTCTTGAAGTGGTGGCCTAACTACGGCTACACTAGAAGAACAGTATTTGGTATCTGCG
CTCTGCTGAAGCCAGTTACCTTCGGAAAAAGAGTTGGTAGCTCTTGATCCGGCAAACAAACCACCGCTGGTAGCG
GTGGTTTTTTTGTTTGCAAGCAGCAGATTACGCGCAGAAAAAAAGGATCTCAAGAAGATCCTTTGATCTTTTCTA
CGGGGTCTGACGCTCAGTGGAACGAAAACTCACGTTAAGGGATTTTGGTCATGAGATTATCAAAAAGGATCTTCA
CCTAGATCCTTTTAAATTAAAAATGAAGTTTTAAATCAATCTAAAGTATATATGAGTAAACTTGGTCTGACAGTT
ACCAATGCTTAATCAGTGAGGCACCTATCTCAGCGATCTGTCTATTTCGTTCATCCATAGTTGCCTGACTCCCCG
TCGTGTAGATAACTACGATACGGGAGGGCTTACCATCTGGCCCCAGTGCTGCAATGATACCGCGAGACCCACGCT
CACCGGCTCCAGATTTATCAGCAATAAACCAGCCAGCCGGAAGGGCCGAGCGCAGAAGTGGTCCTGCAACTTTAT
CCGCCTCCATCCAGTCTATTAATTGTTGCCGGGAAGCTAGAGTAAGTAGTTCGCCAGTTAATAGTTTGCGCAACG
TTGTTGCCATTGCTACAGGCATCGTGGTGTCACGCTCGTCGTTTGGTATGGCTTCATTCAGCTCCGGTTCCCAAC
GATCAAGGCGAGTTACATGATCCCCCATGTTGTGCAAAAAAGCGGTTAGCTCCTTCGGTCCTCCGATCGTTGTCA
GAAGTAAGTTGGCCGCAGTGTTATCACTCATGGTTATGGCAGCACTGCATAATTCTCTTACTGTCATGCCATCCG
TAAGATGCTTTTCTGTGACTGGTGAGTACTCAACCAAGTCATTCTGAGAATAGTGTATGCGGCGACCGAGTTGCT
CTTGCCCGGCGTCAATACGGGATAATACCGCGCCACATAGCAGAACTTTAAAAGTGCTCATCATTGGAAAACGTT
CTTCGGGGCGAAAACTCTCAAGGATCTTACCGCTGTTGAGATCCAGTTCGATGTAACCCACTCGTGCACCCAACT
GATCTTCAGCATCTTTTACTTTCACCAGCGTTTCTGGGTGAGCAAAAACAGGAAGGCAAAATGCCGCAAAAAAGG
GAATAAGGGCGACACGGAAATGTTGAATACTCATACTCTTCCTTTTTCAATATTATTGAAGCATTTATCAGGGTT
ATTGTCTCATGAGCGGATACATATTTGAATGTATTTAGAAAAATAAACAAATAGGGGTTCCGCGCACATTTCCCC
GAAAAGTGCCACCTGACGTCGACGGATCGGGAGATCTCCCGATCCCCTATGGTGCACTCTCAGTACAATCTGCTC
TGATGCCGCATAGTTAAGCCAGTATCTGCTCCCTGCTTGTGTGTTGGAGGTCGCTGAGTAGTGCGCGAGCAAAAT
TTAAGCTACAACAAGGCAAGGCTTGACCGACAATTGCATGAAGAATCTGCTTAGGGTTAGGCGTTTTGCGCTGCT
TCGCGATGTACGGGCCAGATATACGCGTTGACATTGATTATTGACTAGTTATTAATAGTAATCAATTACGGGGTC
ATTAGTTCATAGCCCATATATGGAGTTCCGCGTTACATAACTTACGGTAAATGGCCCGCCTGGCTGACCGCCCAA
CGACCCCCGCCCATTGACGTCAATAATGACGTATGTTCCCATAGTAACGCCAATAGGGACTTTCCATTGACGTCA
ATGGGTGGAGTATTTACGGTAAACTGCCCACTTGGCAGTACATCAAGTGTATCATATGCCAAGTACGCCCCCTAT
TGACGTCAATGACGGTAAATGGCCCGCCTGGCATTATGCCCAGTACATGACCTTATGGGACTTTCCTACTTGGCA
GTACATCTACGTATTAGTCATCGCTATTACCATGGTGATGCGGTTTTGGCAGTACATCAATGGGCGTGGATAGCG
GTTTGACTCACGGGGATTTCCAAGTCTCCACCCCATTGACGTCAATGGGAGTTTGTTTTGGCACCAAAATCAACG
GGACTTTCCAAAATGTCGTAACAACTCCGCCCCATTGACGCAAATGGGCGGTAGGCGTGTACGGTGGGAGGTCTA
TATAAGCAGAGCTCTCTGGCTAACTAGAGAACCCACTGCTTACTGGCTTATCGAAATTAATACGACTCACTATAG
GGAGACCCAAGCTGGCTAGCGTTTAAACTTAAGCTTGCCACCATGGCCCCAAAGAAGAAGCGGAAGGTCGGTATC
CACGGAGTCCCAGCAGCCGGATCCGCCACCAGATCCTTCATCCTGAAGATCGAGCCCAACGAGGAAGTGAAGAAA
GGCCTCTGGAAAACCCACGAGGTGCTGAACCACGGAATCGCCTACTACATGAATATCCTGAAGCTGATCCGGCAA
GAGGCCATCTACGAGCACCACGAGCAGGACCCCAAGAATCCCAAGAAGGTGTCCAAGGCCGAGATCCAGGCCGAG
CTGTGGGATTTCGTGCTGAAGATGCAGAAGTGCAACAGCTTCACACACGAGGTGGACAAGGACGAGGTGTTCAAC
ATCCTGAGAGAGCTGTACGAGGAACTGGTGCCCAGCAGCGTGGAAAAGAAGGGCGAAGCCAACCAGCTGAGCAAC
AAGTTTCTGTACCCTCTGGTGGACCCCAACAGCCAGTCTGGAAAGGGAACAGCCAGCAGCGGCAGAAAGCCCAGA
TGGTACAACCTGAAGATTGCCGGCGATCCCTCCTGGGAAGAAGAGAAGAAGAAGTGGGAAGAAGATAAGAAAAAG
GACCCGCTGGCCAAGATCCTGGGCAAGCTGGCTGAGTACGGACTGATCCCTCTGTTCATCCCCTACACCGACAGC
AACGAGCCCATCGTGAAAGAAATCAAGTGGATGGAAAAGTCCCGGAACCAGAGCGTGCGGCGGCTGGATAAGGAC
ATGTTCATTCAGGCCCTGGAACGGTTCCTGAGCTGGGAGAGCTGGAACCTGAAAGTGAAAGAGGAATACGAGAAG
GTCGAGAAAGAGTACAAGACCCTGGAAGAGAGGATCAAAGAGGACATCCAGGCTCTGAAGGCTCTGGAACAGTAT
GAGAAAGAGCGGCAAGAACAGCTGCTGCGGGACACCCTGAACACCAACGAGTACCGGCTGAGCAAGAGAGGCCTT
AGAGGCTGGCGGGAAATCATCCAGAAATGGCTGAAAATGGACGAGAACGAGCCCTCCGAGAAGTACCTGGAAGTG
TTCAAGGACTACCAGCGGAAGCACCCTAGAGAGGCCGGCGATTACAGCGTGTACGAGTTCCTGTCCAAGAAAGAG
AACCACTTCATCTGGCGGAATCACCCTGAGTACCCCTACCTGTACGCCACCTTCTGCGAGATCGACAAGAAAAAG
AAGGACGCCAAGCAGCAGGCCACCTTCACACTGGCCGATCCTATCAATCACCCTCTGTGGGTCCGATTCGAGGAA
AGAAGCGGCAGCAACCTGAACAAGTACAGAATCCTGACCGAGCAGCTGCACACCGAGAAGCTGAAGAAAAAGCTG
ACAGTGCAGCTGGACCGGCTGATCTACCCTACAGAATCTGGCGGCTGGGAAGAGAAGGGCAAAGTGGACATTGTG
CTGCTGCCCAGCCGGCAGTTCTACAACCAGATCTTCCTGGACATCGAGGAAAAGGGCAAGCACGCCTTCACCTAC
AAGGATGAGAGCATCAAGTTCCCTCTGAAGGGCACACTCGGCGGAGCCAGAGTGCAGTTCGACAGAGATCACCTG
AGAAGATACCCTCACAAGGTGGAAAGCGGCAACGTGGGCAGAATCTACTTCAACATGACCGTGAACATCGAGCCT
ACAGAGTCCCCAGTGTCCAAGTCTCTGAAGATCCACCGGGACGACTTCCCCAAGGTGGTCAACTTCAAGCCCAAA
GAACTGACCGAGTGGATCAAGGACAGCAAGGGCAAGAAACTGAAGTCCGGCATCGAGTCCCTGGAAATCGGCCTG
AGAGTGATGAGCATCGACCTGGGACAGAGACAGGCCGCTGCCGCCTCTATTTTCGAGGTGGTGGATCAGAAGCCC
GACATCGAAGGCAAGCTGTTTTTCCCAATCAAGGGCACCGAGCTGTATGCCGTGCACAGAGCCAGCTTCAACATC
AAGCTGCCCGGCGAGACACTGGTCAAGAGCAGAGAAGTGCTGCGGAAGGCCAGAGAGGACAATCTGAAACTGATG
AACCAGAAGCTCAACTTCCTGCGGAACGTGCTGCACTTCCAGCAGTTCGAGGACATCACCGAGAGAGAGAAGCGG
GTCACCAAGTGGATCAGCAGACAAGAGAACAGCGACGTGCCCCTGGTGTACCAGGATGAGCTGATCCAGATCCGC
GAGCTGATGTACAAGCCTTACAAGGACTGGGTCGCCTTCCTGAAGCAGCTCCACAAGAGACTGGAAGTCGAGATC
GGCAAAGAAGTGAAGCACTGGCGGAAGTCCCTGAGCGACGGAAGAAAGGGCCTGTACGGCATCTCCCTGAAGAAC
ATCGACGAGATCGATCGGACCCGGAAGTTCCTGCTGAGATGGTCCCTGAGGCCTACCGAACCTGGCGAAGTGCGT
AGACTGGAACCCGGCCAGAGATTCGCCATCGACCAGCTGAATCACCTGAACGCCCTGAAAGAAGATCGGCTGAAG
AAGATGGCCAACACCATCATCATGCACGCCCTGGGCTACTGCTACGACGTGCGGAAGAAGAAATGGCAGGCTAAG
AACCCCGCCTGCCAGATCATCCTGTTCGAGGATCTGAGCAACTACAACCCCTACGGAGAAAGGTCCCGCTTCGAG
AACAGCCGGCTCATGAAGTGGTCCAGACGCGAGATCCCCAGACAGGTTGCACTGCAGGGCGAGATCTATGGCCTG
CAAGTGGGAGAAGTGGGCGCTCAGTTCAGCAGCAGATTCCACGCCAAGACAGGCAGCCCTGGCATCAGATGTCGG
GTCGTGACCAAAGAGAAGCTGCAGGACAATCGGTTCTTCAAGAATCTGCAGAGAGAGGGCAGACTGACCCTGGAC
AAAATCGCCGTGCTGAAAGAGGGCGATCTGTACCCAGACAAAGGCGGCGAGAAGTTCATCAGCCTGAGCAAGGAT
CGGAAGTGCGTGACCACACACGCCGACATCAACGCCGCTCAGAACCTGCAGAAGCGGTTCTGGACAAGAACCCAC
GGCTTCTACAAGGTGTACTGCAAGGCCTACCAGGTGGACGGCCAGACCGTGTACATCCCTGAGAGCAAGGACCAG
AAGCAGAAGATCATCGAAGAGTTCGGCGAGGGCTACTTCATTCTGAAGGACGGGGTGTACGAATGGGTCAACGCC
GGCAAGCTGAAAATCAAGAAGGGCAGCTCCAAGCAGAGCAGCAGCGAGCTGGTGGATAGCGACATCCTGAAAGAC
AGCTTCGACCTGGCCTCCGAGCTGAAAGGCGAAAAGCTGATGCTGTACAGGGACCCCAGCGGCAATGTGTTCCCC
AGCGACAAATGGATGGCCGCTGGCGTGTTCTTCGGAAAGCTGGAACGCATCCTGATCAGCAAGCTGACCAACCAG
TACTCCATCAGCACCATCGAGGACGACAGCAGCAAGCAGTCTATGGGATCCAAAAGGCCGGCGGCCACGAAAAAG
GCCGGCCAGGCAAAAAAGAAAAAGggatctTACCCATACGATGTTCCAGATTACGCTTATCCCTACGACGTGCCT
GATTATGCATACCCATATGATGTCCCCGACTATGCCtaaGAATTCTGCAGATATCCAGCACAGTGGCGGCCGCTC
GAGTCTAGAGGGCCCGTTTAAACCCGCTGATCAGCCTCGACTGTGCCTTCTAGTTGCCAGCCATCTGTTGTTTGC
CCCTCCCCCGTGCCTTCCTTGACCCTGGAAGGTGCCACTCCCACTGTCCTTTCCTAATAAAATGAGGAAATTGCA
TCGCATTGTCTGAGTAGGTGTCATTCTATTCTGGGGGGTGGGGTGGGGCAGGACAGCAAGGGGGAGGATTGGGAA
GACAATAGCAGGCATGCTGGGGATGCGGTGGGCTCTATGGCTTCTGAGGCGGAAAGAACCAGCTGGGGCTCTAGG
GGGTATCCCCACGCGCCCTGTAGCGGCGCATTAAGCGCGGCGGGTGTGGTGGTTACGCGCAGCGTGACCGCTACA
CTTGCCAGCGCCCTAGCGCCCGCTCCTTTCGCTTTCTTCCCTTCCTTTCTCGCCACGTTCGCCGGCTTTCCCCGT
CAAGCTCTAAATCGGGGGCTCCCTTTAGGGTTCCGATTTAGTGCTTTACGGCACCTCGACCCCAAAAAACTTGAT
TAGGGTGATGGTTCACGTAGTGGGCCATCGCCCTGATAGACGGTTTTTCGCCCTTTGACGTTGGAGTCCACGTTC
TTTAATAGTGGACTCTTGTTCCAAACTGGAACAACACTCAACCCTATCTCGGTCTATTCTTTTGATTTATAAGGG
ATTTTGCCGATTTCGGCCTATTGGTTAAAAAATGAGCTGATTTAACAAAAATTTAACGCGAATTAATTCTGTGGA
ATGTGTGTCAGTTAGGGTGTGGAAAGTCCCCAGGCTCCCCAGCAGGCAGAAGTATGCAAAGCATGCATCTCAATT
AGTCAGCAACCAGGTGTGGAAAGTCCCCAGGCTCCCCAGCAGGCAGAAGTATGCAAAGCATGCATCTCAATTAGT
CAGCAACCATAGTCCCGCCCCTAACTCCGCCCATCCCGCCCCTAACTCCGCCCAGTTCCGCCCATTCTCCGCCCC
ATGGCTGACTAATTTTTTTTATTTATGCAGAGGCCGAGGCCGCCTCTGCCTCTGAGCTATTCCAGAAGTAGTGAG
GAGGCTTTTTTGGAGGCCTAGGCTTTTGCAAAAAGCTCCCGGGAGCTTGTATATCCATTTTCGGATCTGATCAAG
AGACAGGATGAGGATCGTTTCGCATGATTGAACAAGATGGATTGCACGCAGGTTCTCCGGCCGCTTGGGTGGAGA
GGCTATTCGGCTATGACTGGGCACAACAGACAATCGGCTGCTCTGATGCCGCCGTGTTCCGGCTGTCAGCGCAGG
GGCGCCCGGTTCTTTTTGTCAAGACCGACCTGTCCGGTGCCCTGAATGAACTGCAGGACGAGGCAGCGCGGCTAT
CGTGGCTGGCCACGACGGGCGTTCCTTGCGCAGCTGTGCTCGACGTTGTCACTGAAGCGGGAAGGGACTGGCTGC
TATTGGGCGAAGTGCCGGGGCAGGATCTCCTGTCATCTCACCTTGCTCCTGCCGAGAAAGTATCCATCATGGCTG
ATGCAATGCGGCGGCTGCATACGCTTGATCCGGCTACCTGCCCATTCGACCACCAAGCGAAACATCGCATCGAGC
GAGCACGTACTCGGATGGAAGCCGGTCTTGTCGATCAGGATGATCTGGACGAAGAGCATCAGGGGCTCGCGCCAG
CCGAACTGTTCGCCAGGCTCAAGGCGCGCATGCCCGACGGCGAGGATCTCGTCGTGACCCATGGCGATGCCTGCT
TGCCGAATATCATGGTGGAAAATGGCCGCTTTTCTGGATTCATCGACTGTGGCCGGCTGGGTGTGGCGGACCGCT
ATCAGGACATAGCGTTGGCTACCCGTGATATTGCTGAAGAGCTTGGCGGCGAATGGGCTGACCGCTTCCTCGTGC
TTTACGGTATCGCCGCTCCCGATTCGCAGCGCATCGCCTTCTATCGCCTTCTTGACGAGTTCTTCTGAGCGGGAC
TCTGGGGTTCGAAATGACCGACCAAGCGACGCCCAACCTGCCATCACGAGATTTCGATTCCACCGCCGCCTTCTA
TGAAAGGTTGGGCTTCGGAATCGTTTTCCGGGACGCCGGCTGGATGATCCTCCAGCGCGGGGATCTCATGCTGGA
GTTCTTCGCCCACCCCAACTTGTTTATTGCAGCTTATAATGGTTACAAATAAAGCAATAGCATCACAAATTTCAC
AAATAAAGCATTTTTTTCACTGCATTCTAGTTGTGGTTTGTCCAAACTCATCAATGTATCTTATCATGTCTGTAT
ACCGTCGACCTCTAGCTAGAGCTTGGCGTAATCATGGTCATAGCTGTTTCCTGTGTGAAATTGTTATCCGCTCAC
AATTCCACACAACATACGAGCCGGAAGCATAAAGTGTAAAGCCTGGGGTGCCTAATGAGTGAGCTAACTCACATT
AATTGCGTTGCGCTCACTGCCCGCTTTCCAGTCGGGAAACCTGTCGTGCCAGCTGCATTAATGAATCGGCCAACG
CGCGGGGAGAGGCGGTTTGCGTATTGGGCGCTCTTCCGCTTCCTCGCTCACTGACTCGCTGCGCTCGGTCGTTCG
GCTGCGGCGAGCGGTATCAGCTCACTCAAAGGCGGTAATACGGTTATCCACAGAATCAGGGGATAACGCAGGAA
(SEQ ID NO: 589)

[1641] Plasmid pZ150-pCDNA3-BhCas12b-S893R-K846R-E836K containing BhCas12b with mutations at S893, K846, and E836 was generated. A map of the plasmid is shown in FIG. 35 and the sequence of the cloned construct is shown in Table 29 below.

TABLE 29
Sequence of pZ150-pCDNA3-BhCas12b-5893R-K846R-E836K

AGAACATGTGAGCAAAAGGCCAGCAAAAGGCCAGGAACCGTAAAAAGGCCGCGTTGCTGGCGTTTTTCCATAGGCT
CCGCCCCCCTGACGAGCATCACAAAAATCGACGCTCAAGTCAGAGGTGGCGAAACCCGACAGGACTATAAAGATAC
CAGGCGTTTCCCCCTGGAAGCTCCCTCGTGCGCTCTCCTGTTCCGACCCTGCCGCTTACCGGATACCTGTCCGCCT
TTCTCCCTTCGGGAAGCGTGGCGCTTTCTCATAGCTCACGCTGTAGGTATCTCAGTTCGGTGTAGGTCGTTCGCTC
CAAGCTGGGCTGTGTGCACGAACCCCCCGTTCAGCCCGACCGCTGCGCCTTATCCGGTAACTATCGTCTTGAGTCC
AACCCGGTAAGACACGACTTATCGCCACTGGCAGCAGCCACTGGTAACAGGATTAGCAGAGCGAGGTATGTAGGCG
GTGCTACAGAGTTCTTGAAGTGGTGGCCTAACTACGGCTACACTAGAAGAACAGTATTTGGTATCTGCGCTCTGCT
GAAGCCAGTTACCTTCGGAAAAAGAGTTGGTAGCTCTTGATCCGGCAAACAAACCACCGCTGGTAGCGGTGGTTTT
TTTGTTTGCAAGCAGCAGATTACGCGCAGAAAAAAAGGATCTCAAGAAGATCCTTTGATCTTTTCTACGGGGTCTG
ACGCTCAGTGGAACGAAAACTCACGTTAAGGGATTTTGGTCATGAGATTATCAAAAAGGATCTTCACCTAGATCCT
TTTAAATTAAAAATGAAGTTTTAAATCAATCTAAAGTATATATGAGTAAACTTGGTCTGACAGTTACCAATGCTTA
ATCAGTGAGGCACCTATCTCAGCGATCTGTCTATTTCGTTCATCCATAGTTGCCTGACTCCCCGTCGTGTAGATAA
CTACGATACGGGAGGGCTTACCATCTGGCCCCAGTGCTGCAATGATACCGCGAGACCCACGCTCACCGGCTCCAGA
TTTATCAGCAATAAACCAGCCAGCCGGAAGGGCCGAGCGCAGAAGTGGTCCTGCAACTTTATCCGCCTCCATCCAG
TCTATTAATTGTTGCCGGGAAGCTAGAGTAAGTAGTTCGCCAGTTAATAGTTTGCGCAACGTTGTTGCCATTGCTA
CAGGCATCGTGGTGTCACGCTCGTCGTTTGGTATGGCTTCATTCAGCTCCGGTTCCCAACGATCAAGGCGAGTTAC
ATGATCCCCCATGTTGTGCAAAAAAGCGGTTAGCTCCTTCGGTCCTCCGATCGTTGTCAGAAGTAAGTTGGCCGCA
GTGTTATCACTCATGGTTATGGCAGCACTGCATAATTCTCTTACTGTCATGCCATCCGTAAGATGCTTTTCTGTGA
CTGGTGAGTACTCAACCAAGTCATTCTGAGAATAGTGTATGCGGCGACCGAGTTGCTCTTGCCCGGCGTCAATACG
GGATAATACCGCGCCACATAGCAGAACTTTAAAAGTGCTCATCATTGGAAAACGTTCTTCGGGGCGAAAACTCTCA
AGGATCTTACCGCTGTTGAGATCCAGTTCGATGTAACCCACTCGTGCACCCAACTGATCTTCAGCATCTTTTACTT
TCACCAGCGTTTCTGGGTGAGCAAAAACAGGAAGGCAAAATGCCGCAAAAAAGGGAATAAGGGCGACACGGAAATG
TTGAATACTCATACTCTTCCTTTTTCAATATTATTGAAGCATTTATCAGGGTTATTGTCTCATGAGCGGATACATA
TTTGAATGTATTTAGAAAAATAAACAAATAGGGGTTCCGCGCACATTTCCCCGAAAAGTGCCACCTGACGTCGACG
GATCGGGAGATCTCCCGATCCCCTATGGTGCACTCTCAGTACAATCTGCTCTGATGCCGCATAGTTAAGCCAGTAT
CTGCTCCCTGCTTGTGTGTTGGAGGTCGCTGAGTAGTGCGCGAGCAAAATTTAAGCTACAACAAGGCAAGGCTTGA
CCGACAATTGCATGAAGAATCTGCTTAGGGTTAGGCGTTTTGCGCTGCTTCGCGATGTACGGGCCAGATATACGCG
TTGACATTGATTATTGACTAGTTATTAATAGTAATCAATTACGGGGTCATTAGTTCATAGCCCATATATGGAGTTC
CGCGTTACATAACTTACGGTAAATGGCCCGCCTGGCTGACCGCCCAACGACCCCCGCCCATTGACGTCAATAATGA
CGTATGTTCCCATAGTAACGCCAATAGGGACTTTCCATTGACGTCAATGGGTGGAGTATTTACGGTAAACTGCCCA
CTTGGCAGTACATCAAGTGTATCATATGCCAAGTACGCCCCCTATTGACGTCAATGACGGTAAATGGCCCGCCTGG
CATTATGCCCAGTACATGACCTTATGGGACTTTCCTACTTGGCAGTACATCTACGTATTAGTCATCGCTATTACCA
TGGTGATGCGGTTTTGGCAGTACATCAATGGGCGTGGATAGCGGTTTGACTCACGGGGATTTCCAAGTCTCCACCC
CATTGACGTCAATGGGAGTTTGTTTTGGCACCAAAATCAACGGGACTTTCCAAAATGTCGTAACAACTCCGCCCCA
TTGACGCAAATGGGCGGTAGGCGTGTACGGTGGGAGGTCTATATAAGCAGAGCTCTCTGGCTAACTAGAGAACCCA
CTGCTTACTGGCTTATCGAAATTAATACGACTCACTATAGGGAGACCCAAGCTGGCTAGCGTTTAAACTTAAGCTT
GCCACCATGGCCCCAAAGAAGAAGCGGAAGGTCGGTATCCACGGAGTCCCAGCAGCCGGATCCGCCACCAGATCCT
TCATCCTGAAGATCGAGCCCAACGAGGAAGTGAAGAAAGGCCTCTGGAAAACCCACGAGGTGCTGAACCACGGAAT
CGCCTACTACATGAATATCCTGAAGCTGATCCGGCAAGAGGCCATCTACGAGCACCACGAGCAGGACCCCAAGAAT
CCCAAGAAGGTGTCCAAGGCCGAGATCCAGGCCGAGCTGTGGGATTTCGTGCTGAAGATGCAGAAGTGCAACAGCT
TCACACACGAGGTGGACAAGGACGAGGTGTTCAACATCCTGAGAGAGCTGTACGAGGAACTGGTGCCCAGCAGCGT
GGAAAAGAAGGGCGAAGCCAACCAGCTGAGCAACAAGTTTCTGTACCCTCTGGTGGACCCCAACAGCCAGTCTGGA
AAGGGAACAGCCAGCAGCGGCAGAAAGCCCAGATGGTACAACCTGAAGATTGCCGGCGATCCCTCCTGGGAAGAAG
AGAAGAAGAAGTGGGAAGAAGATAAGAAAAAGGACCCGCTGGCCAAGATCCTGGGCAAGCTGGCTGAGTACGGACT
GATCCCTCTGTTCATCCCCTACACCGACAGCAACGAGCCCATCGTGAAAGAAATCAAGTGGATGGAAAAGTCCCGG
AACCAGAGCGTGCGGCGGCTGGATAAGGACATGTTCATTCAGGCCCTGGAACGGTTCCTGAGCTGGGAGAGCTGGA
ACCTGAAAGTGAAAGAGGAATACGAGAAGGTCGAGAAAGAGTACAAGACCCTGGAAGAGAGGATCAAAGAGGACAT
CCAGGCTCTGAAGGCTCTGGAACAGTATGAGAAAGAGCGGCAAGAACAGCTGCTGCGGGACACCCTGAACACCAAC
GAGTACCGGCTGAGCAAGAGAGGCCTTAGAGGCTGGCGGGAAATCATCCAGAAATGGCTGAAAATGGACGAGAACG
AGCCCTCCGAGAAGTACCTGGAAGTGTTCAAGGACTACCAGCGGAAGCACCCTAGAGAGGCCGGCGATTACAGCGT
GTACGAGTTCCTGTCCAAGAAAGAGAACCACTTCATCTGGCGGAATCACCCTGAGTACCCCTACCTGTACGCCACC
TTCTGCGAGATCGACAAGAAAAAGAAGGACGCCAAGCAGCAGGCCACCTTCACACTGGCCGATCCTATCAATCACC
CTCTGTGGGTCCGATTCGAGGAAAGAAGCGGCAGCAACCTGAACAAGTACAGAATCCTGACCGAGCAGCTGCACAC
CGAGAAGCTGAAGAAAAAGCTGACAGTGCAGCTGGACCGGCTGATCTACCCTACAGAATCTGGCGGCTGGGAAGAG
AAGGGCAAAGTGGACATTGTGCTGCTGCCCAGCCGGCAGTTCTACAACCAGATCTTCCTGGACATCGAGGAAAAGG
GCAAGCACGCCTTCACCTACAAGGATGAGAGCATCAAGTTCCCTCTGAAGGGCACACTCGGCGGAGCCAGAGTGCA
GTTCGACAGAGATCACCTGAGAAGATACCCTCACAAGGTGGAAAGCGGCAACGTGGGCAGAATCTACTTCAACATG
ACCGTGAACATCGAGCCTACAGAGTCCCCAGTGTCCAAGTCTCTGAAGATCCACCGGGACGACTTCCCCAAGGTGG
TCAACTTCAAGCCCAAAGAACTGACCGAGTGGATCAAGGACAGCAAGGGCAAGAAACTGAAGTCCGGCATCGAGTC
CCTGGAAATCGGCCTGAGAGTGATGAGCATCGACCTGGGACAGAGACAGGCCGCTGCCGCCTCTATTTTCGAGGTG
GTGGATCAGAAGCCCGACATCGAAGGCAAGCTGTTTTTCCCAATCAAGGGCACCGAGCTGTATGCCGTGCACAGAG
CCAGCTTCAACATCAAGCTGCCCGGCGAGACACTGGTCAAGAGCAGAGAAGTGCTGCGGAAGGCCAGAGAGGACAA
TCTGAAACTGATGAACCAGAAGCTCAACTTCCTGCGGAACGTGCTGCACTTCCAGCAGTTCGAGGACATCACCGAG
AGAGAGAAGCGGGTCACCAAGTGGATCAGCAGACAAGAGAACAGCGACGTGCCCCTGGTGTACCAGGATGAGCTGA
TCCAGATCCGCGAGCTGATGTACAAGCCTTACAAGGACTGGGTCGCCTTCCTGAAGCAGCTCCACAAGAGACTGGA
AGTCGAGATCGGCAAAGAAGTGAAGCACTGGCGGAAGTCCCTGAGCGACGGAAGAAAGGGCCTGTACGGCATCTCC
CTGAAGAACATCGACGAGATCGATCGGACCCGGAAGTTCCTGCTGAGATGGTCCCTGAGGCCTACCGAACCTGGCG
AAGTGCGTAGACTGGAACCCGGCCAGAGATTCGCCATCGACCAGCTGAATCACCTGAACGCCCTGAAAGAAGATCG
GCTGAAGAAGATGGCCAACACCATCATCATGCACGCCCTGGGCTACTGCTACGACGTGCGGAAGAAGAAATGGCAG
GCTAAGAACCCCGCCTGCCAGATCATCCTGTTCGAGGATCTGAGCAACTACAACCCCTACAAGGAAAGGTCCCGCT
TCGAGAACAGCCGGCTCATGAAGTGGTCCAGACGCGAGATCCCCAGACAGGTTGCACTGCAGGGCGAGATCTATGG
CCTGCAAGTGGGAGAAGTGGGCGCTCAGTTCAGCAGCAGATTCCACGCCAAGACAGGCAGCCCTGGCATCAGATGT
CGGGTCGTGACCAAAGAGAAGCTGCAGGACAATCGGTTCTTCAAGAATCTGCAGAGAGAGGGCAGACTGACCCTGG
ACAAAATCGCCGTGCTGAAAGAGGGCGATCTGTACCCAGACAAAGGCGGCGAGAAGTTCATCAGCCTGAGCAAGGA
TCGGAAGTGCGTGACCACACACGCCGACATCAACGCCGCTCAGAACCTGCAGAAGCGGTTCTGGACAAGAACCCAC
GGCTTCTACAAGGTGTACTGCAAGGCCTACCAGGTGGACGGCCAGACCGTGTACATCCCTGAGAGCAAGGACCAGA
AGCAGAAGATCATCGAAGAGTTCGGCGAGGGCTACTTCATTCTGAAGGACGGGGTGTACGAATGGGTCAACGCCGG
CAAGCTGAAAATCAAGAAGGGCAGCTCCAAGCAGAGCAGCAGCGAGCTGGTGGATAGCGACATCCTGAAAGACAGC
TTCGACCTGGCCTCCGAGCTGAAAGGCGAAAAGCTGATGCTGTACAGGGACCCCAGCGGCAATGTGTTCCCCAGCG
ACAAATGGATGGCCGCTGGCGTGTTCTTCGGAAAGCTGGAACGCATCCTGATCAGCAAGCTGACCAACCAGTACTC
CATCAGCACCATCGAGGACGACAGCAGCAAGCAGTCTATGGGATCCAAAAGGCCGGCGGCCACGAAAAAGGCCGGC
CAGGCAAAAAAGAAAAAGggatctTACCCATACGATGTTCCAGATTACGCTTATCCCTACGACGTGCCTGATTATG
CATACCCATATGATGTCCCCGACTATGCCtaaGAATTCTGCAGATATCCAGCACAGTGGCGGCCGCTCGAGTCTAG
AGGGCCCGTTTAAACCCGCTGATCAGCCTCGACTGTGCCTTCTAGTTGCCAGCCATCTGTTGTTTGCCCCTCCCCC
GTGCCTTCCTTGACCCTGGAAGGTGCCACTCCCACTGTCCTTTCCTAATAAAATGAGGAAATTGCATCGCATTGTC
TGAGTAGGTGTCATTCTATTCTGGGGGGTGGGGTGGGGCAGGACAGCAAGGGGGAGGATTGGGAAGACAATAGCAG
GCATGCTGGGGATGCGGTGGGCTCTATGGCTTCTGAGGCGGAAAGAACCAGCTGGGGCTCTAGGGGGTATCCCCAC
GCGCCCTGTAGCGGCGCATTAAGCGCGGCGGGTGTGGTGGTTACGCGCAGCGTGACCGCTACACTTGCCAGCGCCC
TAGCGCCCGCTCCTTTCGCTTTCTTCCCTTCCTTTCTCGCCACGTTCGCCGGCTTTCCCCGTCAAGCTCTAAATCG
GGGGCTCCCTTTAGGGTTCCGATTTAGTGCTTTACGGCACCTCGACCCCAAAAAACTTGATTAGGGTGATGGTTCA
CGTAGTGGGCCATCGCCCTGATAGACGGTTTTTCGCCCTTTGACGTTGGAGTCCACGTTCTTTAATAGTGGACTCT
TGTTCCAAACTGGAACAACACTCAACCCTATCTCGGTCTATTCTTTTGATTTATAAGGGATTTTGCCGATTTCGGC
CTATTGGTTAAAAAATGAGCTGATTTAACAAAAATTTAACGCGAATTAATTCTGTGGAATGTGTGTCAGTTAGGGT
GTGGAAAGTCCCCAGGCTCCCCAGCAGGCAGAAGTATGCAAAGCATGCATCTCAATTAGTCAGCAACCAGGTGTGG
AAAGTCCCCAGGCTCCCCAGCAGGCAGAAGTATGCAAAGCATGCATCTCAATTAGTCAGCAACCATAGTCCCGCCC
CTAACTCCGCCCATCCCGCCCCTAACTCCGCCCAGTTCCGCCCATTCTCCGCCCCATGGCTGACTAATTTTTTTTA
TTTATGCAGAGGCCGAGGCCGCCTCTGCCTCTGAGCTATTCCAGAAGTAGTGAGGAGGCTTTTTTGGAGGCCTAGG
CTTTTGCAAAAAGCTCCCGGGAGCTTGTATATCCATTTTCGGATCTGATCAAGAGACAGGATGAGGATCGTTTCGC
ATGATTGAACAAGATGGATTGCACGCAGGTTCTCCGGCCGCTTGGGTGGAGAGGCTATTCGGCTATGACTGGGCAC
AACAGACAATCGGCTGCTCTGATGCCGCCGTGTTCCGGCTGTCAGCGCAGGGGCGCCCGGTTCTTTTTGTCAAGAC
CGACCTGTCCGGTGCCCTGAATGAACTGCAGGACGAGGCAGCGCGGCTATCGTGGCTGGCCACGACGGGCGTTCCT
TGCGCAGCTGTGCTCGACGTTGTCACTGAAGCGGGAAGGGACTGGCTGCTATTGGGCGAAGTGCCGGGGCAGGATC
TCCTGTCATCTCACCTTGCTCCTGCCGAGAAAGTATCCATCATGGCTGATGCAATGCGGCGGCTGCATACGCTTGA
TCCGGCTACCTGCCCATTCGACCACCAAGCGAAACATCGCATCGAGCGAGCACGTACTCGGATGGAAGCCGGTCTT
GTCGATCAGGATGATCTGGACGAAGAGCATCAGGGGCTCGCGCCAGCCGAACTGTTCGCCAGGCTCAAGGCGCGCA
TGCCCGACGGCGAGGATCTCGTCGTGACCCATGGCGATGCCTGCTTGCCGAATATCATGGTGGAAAATGGCCGCTT
TTCTGGATTCATCGACTGTGGCCGGCTGGGTGTGGCGGACCGCTATCAGGACATAGCGTTGGCTACCCGTGATATT
GCTGAAGAGCTTGGCGGCGAATGGGCTGACCGCTTCCTCGTGCTTTACGGTATCGCCGCTCCCGATTCGCAGCGCA
TCGCCTTCTATCGCCTTCTTGACGAGTTCTTCTGAGCGGGACTCTGGGGTTCGAAATGACCGACCAAGCGACGCCC
AACCTGCCATCACGAGATTTCGATTCCACCGCCGCCTTCTATGAAAGGTTGGGCTTCGGAATCGTTTTCCGGGACG
CCGGCTGGATGATCCTCCAGCGCGGGGATCTCATGCTGGAGTTCTTCGCCCACCCCAACTTGTTTATTGCAGCTTA
TAATGGTTACAAATAAAGCAATAGCATCACAAATTTCACAAATAAAGCATTTTTTTCACTGCATTCTAGTTGTGGT
TTGTCCAAACTCATCAATGTATCTTATCATGTCTGTATACCGTCGACCTCTAGCTAGAGCTTGGCGTAATCATGGT
CATAGCTGTTTCCTGTGTGAAATTGTTATCCGCTCACAATTCCACACAACATACGAGCCGGAAGCATAAAGTGTAA
AGCCTGGGGTGCCTAATGAGTGAGCTAACTCACATTAATTGCGTTGCGCTCACTGCCCGCTTTCCAGTCGGGAAAC
CTGTCGTGCCAGCTGCATTAATGAATCGGCCAACGCGCGGGGAGAGGCGGTTTGCGTATTGGGCGCTCTTCCGCTT
CCTCGCTCACTGACTCGCTGCGCTCGGTCGTTCGGCTGCGGCGAGCGGTATCAGCTCACTCAAAGGCGGTAATACG
GTTATCCACAGAATCAGGGGATAACGCAGGAA (SEQ ID NO: 590)

### Example 18

[1642] E. coli PAMs for BhCas12b were determined by an in vitro PAM screen under various conditions. The results are shown in FIG. 36.

### Example 19

[1643] E. coli PAMs for BvCas112b were determined by an in vitro PAM screen under various conditions. The results are shown in FIG. 37.

### Example 20

[1644] Variants of BhCas12b were generated. The mutations are shown in Table 30 below.

TABLE 30

| BhCas12b Variants | Mutations in the variant |
|---|---|
| BhCas12b Variant 1 | S893R |
| BhCas12b Variant 2 | S893R/K846R |
| BhCas12b Variant 3 | K846R/E837G |
| BhCas12b Variant 4 | S893R/K846R/E837G |

[1645] Activities of the variants were evaluated by testing indel percentages at different binding sites. The results of the tests are shown in FIG. 38.

### Example 21

[1646] Additional variants of BhCas12b were generated and their activities were tested and compared with the variants generated in Example 20.

[1647] The additional variants contained mutations S893R and K846R, and further contained the mutations E837H, E837K, E837N, E837L, E837I, D533G, N644K, D680P, L741Q, L792Q, F881L, V895A, V980E, T984A, K1022E, or M1073I. Activities of the variants were evaluated by testing indel percentages at different binding sites. The results of the tests are shown in FIG. 39.

### Example 22

[1648] HDR with cleavage by BhCas12b (Variant 4 in Example 20) and wildtype BvCas12b were tested at different sites. The results of HDR at DNMT1-1 are shown in FIG. 40A and HDR at VEGFA-2 are shown in FIG. 40B.

### Example 23

[1649] This example shows experiments that were performed in 293T cells for testing Cas12b orthologs' activities access different PAM as well as experiments performed with ssODN donors.

[1650] FIG. 41A shows comparison of indels percentages of AsCas12a at TTTV PAMs and BhCas12b variant 4 and BvCas12b ATTN PAMS. FIG. 41B shows breakdown of BhCas12b variant 4 and BvCas12b activities at different PAM sequences.

[1651] FIG. 42A shows schematic of a VEGFA target including the desired changes to be introduced with ssDNA donors. FIG. 42B shows indel activity of each nuclease at the VEGFA target site. FIG. 42C shows percentage of cells that contain the desired edit (two nucleotide substitution) at VEGFA site. FIG. 42D shows Schematic of a DNMT1 target including the desired changes to be introduced with ssDNA donors. FIG. 42E shows indel activity of each nuclease at the DNMT1 target site. FIG. 42E shows percentage of cells that contain the desired edit (two nucleotide substitution) at DNMT1site. For FIGS. 42C and 42E, Perfect edits shown in blue and red bars indicate the percentage of cells containing a perfectly corrected locus as indicated in the schematic which include the desired two nucleotide substitution, and mutation of both PAMs with no additional mutations.

### Example 24

[1652] BhCas12b (v4) and BvCas12b ribonucleoprotein (RNP) complexes with sgRNA targeting the CXCR4 gene were assembled in vitro and electroporated into human CD4+ T cells using a Lonza 4D-Nucleofector. The human CD4+ T cells were acquired from two different donors. The RNPs were delivered at 3 μM final concentration into 3×10⁵ cells. Electroporated cells were harvested after 48h and indel mutations read out by targeted deep sequencing. The left panel of FIG. 43 shows the targeted exon of CXCR4 and the CXCR4 sequences targeted by BhCas12b (v4) and BvCas12b, respectively. The right panel of FIG. 43 shows indel percentages showing the effects of BhCas12b(v4) and BvCas12b on CXCR4 in the T cells from the two donors.

### Example 25—Genome Editing Using CRISPR-Cas12b

[1653] The type-V CRISPR effector Cas12b (also known as C2c1) has been challenging to develop for genome editing in human cells, at least in part due to the high temperature requirement of the characterized family members. Here Applicants explored the diversity of the Cas12b family and identified an example promising candidate for human gene editing from Bacillus hisashii, BhCas12b. At 37° C., wildtype BhCas12b preferentially nicks the non-target DNA strand instead of forming a double strand break, leading to lower editing efficiency. Using a combination of approaches, Applicants identified gain-of-function mutations for BhCas12b that overcome this limitation. Mutant BhCas12b facilitated robust genome editing in human cell lines and ex vivo in primary human T cells, and exhibited greater specificity compared to S. pyogenes Cas9. This work establishes a third RNA-guided nuclease platform, in addition to Cas9 and Cpf1/Cas12a, for genome editing in human cells.

[1654] Here Applicants searched for mesophilic Cas12b enzymes and identified a promising candidate from Bacillus hisashii, BhCas12b, which preferentially nicks the non-target DNA strand at 37° C. Using a combination of approaches, Applicants engineered BhCas12b variants that overcome this limitation and cleave both DNA strands at 37° C. Applicants also identified a second Bacillus sp. ortholog sequenced from a sample isolated from the clean room where the Viking spacecrafts were assembled², BvCas12b, which naturally mimics the engineered BhCas12b variant. Both characterized Cas12b nucleases facilitated efficient genome-editing in human cells and exhibited a higher specificity compared to Cas9. Thus, the characterization and engineering of BhCas12b and BvCas12b provide new tools for highly-specific genome editing in human cells, unlocking the potential of this novel class of CRISPR-Cas systems.

[1655] Genome editing tools may be desired to be reprogrammable and highly specific, and the prokaryotic Clustered, Regularly Interspaced Short Palindromic Repeats and CRISPR-associated proteins (CRISPR-Cas) systems are naturally endowed with these properties. Current genome editing technology has focused on Class 2 CRISPR-Cas systems, which contain single-protein effector nucleases for genome cleavage, however, only two families of Class 2 nucleases have been harnessed for genome editing in human cells to date: Cas9^{5,6}, which may function with a tracrRNA⁷ and contains both HNH and RuvC nuclease domains^{8,9}, and Cas12a¹⁰, which uses a short crRNA and contains a single RuvC domain. Here Applicants focused on a third family of Class 2 endonuclease, Cas12b, which contains a single RuvC domain and requires a tracrRNA¹¹ (FIG. 44a). Although Cas12b proteins are often smaller than Cas9 and Cas12a and appear potentially promising for genome editing, the best characterized Cas12b nuclease from Alicyclobacillus acidoterrestris (AacCas12b) exhibits optimal DNA cleavage activity at 48° C.¹. Given the diverse properties of Cas effectors within well-characterized families^{10,12}, Applicants sought to identify Cas12b family members that would be active at lower temperatures and thus could be adapted for human genome editing.

[1656] A BLAST search of the updated sequence databases using previously detected Cas12b proteins as queries identified about 25 members of the Cas12b family that are encoded within type V-B loci. The type V-B systems are widely scattered among bacteria, and topology of the phylogenetic tree of Cas12b (FIG. 48a) generally does not follow the bacterial taxonomy, suggestive of extensive horizontal mobility. Notably, however, about half of the type V-B loci that form a strongly supported clade in the tree are found in members of the bacterial order Bacillales. Applicants chose 14 uncharacterized Cas12b genes from diverse bacteria for experimental study (FIG. 48e), avoiding previously described members and those from recognized thermophiles. All known Class 2 DNA-targeting CRISPR-Cas nucleases require a protospacer-adjacent motif (PAM)^{8,10} for DNA cleavage, and the initial characterization of the Cas12b family revealed a PAM on the 5′ side of the target site. To confirm that identified loci are functional CRISPR-Cas systems and to identify their PAMs, for each of the 14 candidates, Applicants expressed a human codon optimized Cas12b with their natural flanking sequence in E. coli and challenged transformed cells with a randomized 5′ PAM library followed by deep sequencing (FIGS. 48b and 48c). Applicants detected depletion in 4 of the 14 tested Cas12b systems (AkCas12b, BhCas12b, EbCas12b, and LsCas12b) indicating functional DNA interference in a heterologous host. Depleted PAMs were T-rich at positions 1-4 bp upstream of the spacer, consistent with the preferences observed for previously studied Cas12b members¹¹. Applicants performed small RNA-Seq on E. coli lysates to identify the required RNA components and found putative tracrRNAs mapping to the region between Cas12b and the CRISPR array (FIGS. 49a-49d).

[1657] To biochemically characterize Cas12b, Applicants tested for in vitro activity with purified Cas12b protein and predicted tracrRNA and crRNA, on targets containing the identified PAM (FIG. 44b, FIG. 49e). Applicants observed only minimal activity with EbCas12b and LsCas12b, however, both AkCas12b and BhCas12b exhibited strong cleavage at 37° C., warranting further investigation in human cells. Given that genome editing in cells is more efficient with a single guide RNA (sgRNA)¹³, Applicants designed sgRNAs for both AkCas12b and BhCas12b and validated their activity in vitro (FIG. 49f). Applicants transfected 293T cells with plasmids expressing NLS-tagged Cas12b and sgRNA driven by a U6 promoter and monitored nuclease activity through the formation of insertion or deletion (indel) mutations by targeted deep sequencing. The observed indel rate for both Cas12b proteins was detectable, but below 1% (FIGS. 44c and 44d). To increase efficiency, Applicants tested the effect of changes in the sgRNA scaffolds by altering the tracrRNA and crRNA linkage, removing hairpin mismatches, and modifying the 5′ start site and spacer length (FIGS. 44c-44e, FIG. 50). Although alterations in the AkCas12b sgRNA had little effect, a 5-nt 5′ truncation of the BhCas12b sgRNA substantially improved activity across multiple targets.

[1658] Applicants frequently observed a slower migrating band during gel electrophoresis of in vitro cleavage reactions, most notably, with AkCas12b, which suggested that Cas12b can nick double stranded DNA (dsDNA) substrates (FIG. 44b). Reactions with differentially labelled DNA strands revealed that AkCas12b and BhCas12b preferentially cut the non-target strand, and that this behavior was more pronounced at lower temperatures (FIG. 45a). As the inability to cleave the target-strand reduces the potential of BhCas12b as a genome editing tool, Applicants sought to address this limitation through protein engineering.

[1659] The target-strand might be poorly accessible to the RuvC active site of BhCas12b. Applicants tested whether altering the properties of this pocket in BhCas12b might improve target-strand accessibility and DNA cleavage. Applicants mutated 12 BhCas12b residues identified through alignments with AacCas12b, residues which were also conserved in the structure of the nearly identical Cas12b from Bacillus thermoamylovorans (BthCas12b)(BthCas12b also exhibited activity in cells, but not as efficiently as BhCas12b FIG. 51a)¹⁵. Applicants measured indel activity at two target sites with a total of 268 BhCas12b single mutants and found increased activity with several mutations including K846R and S893R, which exhibited additive effects as a double mutant (FIGS. 45b and 45c, FIGS. 51b and 51c). As positively charged arginine side chains often interact with the backbone of nucleic acids¹⁶, it is possible that increased DNA-binding affinity of the mutants helps pull the target-strand towards the RuvC active site and promote DNA cleavage.

[1660] As an orthogonal approach, Applicants sought to address the temperature-dependence of target-strand cleavage. Applicants generated glycine substitutions at 66 surface exposed residues and again tested for indel activity at two target sites. Strikingly, Applicants observed over 2-fold improvement relative to wild-type with the E837G variant, a position that is located between the guide RNA:DNA duplex and the RuvC active site (FIGS. 45d and 45e). Testing combinations of mutations led to progressively active variants with a final BhCas12b v4 mutant containing K846R/S893R/E837G that exhibited the highest activity across multiple targets (FIGS. 45f and 45g). In agreement with these results in human cells, purified BhCas12b v4 protein exhibited increased dsDNA cleavage activity at 37° C. and a clear reduction of nicked dsDNA (FIG. 45h, FIGS. 51g-51j).

[1661] Applicant's initial selection of Cas12b enzymes avoided orthologs from the same species to increase the diversity of the screened variants. However, given the positive genome editing results with BhCas12b, Applicants revisited Bacillus sp. members and found a Cas12b ortholog encoded in the recently deposited genome from Bacillus sp. V3-13² (41% sequence identity to BhCas12b), which was isolated from the clean room where the Viking spacecrafts were assembled². Applicants characterized this protein, herein referred to as BvCas12b, and found that BvCas12b efficiently cleaves target DNA with an ATTN PAM at 37° C. (FIG. 52). Interestingly, the BhCas12b v4 mutations K846R and S893R correspond to R849 and H896 in BvCas12b respectively (FIG. 53a), suggesting that BvCas12b might have naturally evolved optimal dsDNA cleavage activity. Consistent with this idea, Applicants did not detect any nicking products with BvCas12b in vitro (FIG. 53b). In addition, targeted mutations in the target-strand pocket of BvCas12b all decreased activity, as did glycine substitutions corresponding to BhCas12b E837G (FIG. 53c-53e).

[1662] Robust genome editing tools may be desired to be effective and specific across a range of targets. Applicants investigated Cas12b activity more thoroughly in comparison to previously studied Cas nucleases. Applicants tested BhCas12b v4 and BvCas12b at 56 targets across 5 genes in 293T cells and found robust cleavage at ATTN PAMs using AsCas12a at TTTV PAMs as a positive control (FIG. 46a). Analysis of the indel patterns formed by Cas12b revealed predominant 5-15-bp deletions (FIG. 46b). Applicants also observed high Cas12b activity at a subset of TTTN and GTTN PAMs, although this activity was less robust (FIG. 54a). Applicants observed only a weak correlation between the activities of BhCas12b v4 and BvCas12b at matched sites (R²=0.48), and numerous targets were more efficiently cleaved by one of the two nucleases (FIG. 54b). These findings emphasize the benefit of multiple orthologs and the continued need to thoroughly investigate the targeting rules of Cas nucleases. Analysis of ATTN prevalence in the human genome revealed similar targetability to Cas12a enzymes (FIG. 54c). In contrast to SpCas9 and AsCas12a, analysis of the indel patterns formed by BhCas12b revealed prominent larger deletions of 5-15 bp (FIG. 46f). Co-transfection of Cas12b nucleases with single-strand oligonucleotide (ssODN) donors led to comparable editing efficiency as SpCas9 and AsCas12a at a TTTC PAM target (FIGS. 46c-46e), and higher editing efficiency at an ATTC PAM target (FIGS. 54d-54f). To further evaluate the efficacy of BhCas12b v4 in human cells, Applicants tested the ability of Cas12b ribonucleoproteins (RNPs) to edit primary human T cells. Applicants generated BhCas12b v4-sgRNA complexes and delivered them into human CD4+ T cells by electroporation. BhCas12b v4 RNPs exhibited indel rates of 32-49% across 3 tested targets (FIG. 46g). Together, these data indicate that BhCas12 v4 and BvCas12b can be harnessed as functional programmable nucleases in a variety of genome editing contexts, including in a therapeutically relevant human cell type.

[1663] Applicants next sought to determine Cas12b specificity in cells. Applicants chose 9 target sites with comparable indel activity between different Cas nucleases (FIG. 47a) and performed Guide-Seq¹⁹ analysis with these targets. Applicants did not detect any off-target sites for both Cas12b nucleases and AsCas12a, whereas SpCas9 led to prominent off-target cleavage in 6 of the 9 tested guides (FIG. 47b, FIG. 55), consistent with its known promiscuity °. For example, for Target 3, Applicants detected 101 insertion sites with SpCas9, with only 10% of reads mapping to the target site, but no off-target sites with either of the two Cas12b enzymes. Additional Guide-Seq experiments at unmatched sites detected significant off-target cleavage at only 2 of 14 sites for BhCas12b v4 and at 1 of 15 sites for BvCas12b (FIGS. 56a, 57). Consistent with these findings, Applicants observed limited indel activity with double mismatches between the guide RNA and target DNA in positions 1-20, and even a low tolerance for single mismatches (FIGS. 56b and 56c). These results agree with the reported specificity of AacCas12b in vitro²¹ and provide a molecular mechanism for the low off-target activity observed in cells.

[1664] Here Applicants describe the first two members of the type-V CRISPR Cas12b family that are suitable for genome editing in human cells. Although many Cas12b nucleases show a strong preference for higher temperatures, our extensive screening led to the identification of members of this family that are highly active at 37° C. Furthermore, our engineering of BhCas12b led to a substantial increase in the efficiency of dsDNA cleavage and provides a framework for unlocking the potential of other Cas12b nucleases as genome editing tools. Both BhCas12b and BvCas12b are comparatively compact proteins (about 1100 amino acids each), and therefore, are suitable for efficient packaging into adeno-associated virus (AAV). In combination with their high target specificity, these Cas12b enzymes are promising new tools for in vivo genome editing.

Supplementary Information. Multiple Alignment of Cas12b Family Proteins

[1665] Sequences are denoted by accession numbers. The sequences from Bacillus sp V3-13 (WP 101661451.1) and Bacillus hisashii (WP_095142515.1) are highlighted in red. The 12 residues mutated in this work are shown by red highlighting in the B. hisashii (WP_095142515.1) sequence. The residues for which the substitutions substantially affected the DNA cleavage efficiency in the BhCas12 v4 mutant are rendered in yellow, with a red highlight.

### Materials and Methods

### Cas12b Sequence Alignment and Phylogenetic Tree Reconstruction

[1666] The alignment was constructed using MUSCLE program (v 3.7)²³. Alignment was colored using www.bioinformatics.org/sms2/color_align_cons.htm server according to 100% consensus for the following groups of amino acids: GAVLI, FYW, CM, ST, KRH, DENQ, P. The positions with more than 50% gaps were discarded from the alignment used for tree reconstruction. The maximum-likelihood unrooted tree was generated using the PHYML program (v. 20120412)²⁴. The same program was also used to compute bootstrap values, which are shown for selected branches.

### Generation of Cas12b Expression Plasmids

[1667] Cas12b loci were synthesized and cloned into pACYC184 (Genewiz) for expression in E. coli. The Cas12b open reading frame (ORF) was codon optimized for human expression while upstream and downstream sequences flanking the ORF were left unchanged. CRISPR arrays were shorted to 3 direct repeats and the first endogenous spacer was replaced with the FnCpf1 protospacer 1 (FnPSP1) sequence

(SEQ ID NO: 591)
(GAGAAGTCATTTAATAAGGCCACTGTTAAAA).

### PAM Discovery

[1668] The identification of PAMs was performed as previously Described®. Briefly, E. coli cells expressing pACYC184-Cas12b systems were made competent with the Z-competent kit (Zymo Research). Cells expressing pACYC184-Cas12b or empty pACYC184 were transformed with a PAM library with randomized 8N sequence on the 5′ side of the FnPSP1 target site and grown overnight for 16 h. Plasmid DNA was isolated, and the library sequenced using a 75-cycle NextSeq kit (Illumina). PAM representation in the library was determined using a custom Python script and compared between Cas12b and control with 2 independent replicates. Sequence motifs were generated using the Weblogo tool (weblogo.berkeley.edu). PAM wheels were generated using Krona plots (github.com/marbl/Krona/wiki)²².

### Bacterial RNA Sequencing

[1669] Small RNA-Seq was performed as previously described^{1,10}. Briefly, RNA was prepared from E. coli lysates using TRIzol followed by homogenization with a BeadBeater (BioSpec Products). rRNA was removed with the Ribo-Zero kit (Illumina) and libraries prepared using the NEBNext Small RNA Library Kit for Illumina (NEB). Libraries were sequenced with a 2×150 paired-end MiSeq run (Illumina) and the reads aligned and analyzed with Geneious R9 (Biomatters).

### Purification of Cas12b Protein

[1670] Cas12b genes were cloned into bacterial expression plasmids (T7-TwinStrep-SUMO-NLS-Cas12b-NLS-3×HA) and expressed in BL21(DE3) cells (NEB #C2527H containing the pLysS-tRNA plasmid from Novagen #70956). Cells were grown in Terrific Broth to mid-log phase and the temperature lowered to 20° C. Expression was induced at 0.6 OD with 0.25 mM IPTG for 16-20 h before harvesting and freezing cells at −80° C. Cell paste was resuspended in lysis buffer (50 mM TRIS pH 8, 500 mM NaCl, 5% glycerol, 1 mM DTT) supplemented with EDTA-free complete protease inhibitor (Roche). Cells were lysed using a LM20 microfluidizer device (Microfluidics) and cleared lysate bound to Strep-Tactin Superflow Plus resin (Qiagen). Resin was washed using lysis buffer and Cas12b protein eluted with lysis buffer supplemented with 5 mM desthiobiotin. The TwinStrep-SUMO tag was removed by overnight digest at 4° C. with homemade SUMO protease Ulp1 at a 1:100 weight ratio of protease to Cas12b. Cleaved Cas12b protein was diluted to 200 mM NaCl and purified using a HiTrap Heparin HP column on an AKTA Pure 25 L (GE Healthcare Life Sciences) with a 200 mM-1M NaCl gradient. Fractions containing Cas12b were pooled and concentrated and loaded onto a Superdex 200 Increase column (GE Healthcare Life Sciences) with a final storage buffer of 25 mM TRIS pH 8, 500 mM NaCl, 5% glycerol, 1 mM DTT. Purified Cas12b protein was concentrated to 5 uM or 73 uM stocks and flash-frozen in liquid nitrogen before storage at −80° C.

### In Vitro RNA Synthesis

[1671] All RNA was generated by annealing a DNA oligonucleotide containing the reverse complement of the desired RNA with a short T7 oligonucleotide. In vitro transcription was performed using the HiScribe T7 High Yield RNA synthesis kit (NEB) at 37° C. for 8-12 h and RNA purified using Agencourt AMPure RNA Clean beads (Beckman Coulter).

### In Vitro Cleavage Reactions

[1672] DNA substrates were generated by PCR amplification of pUC19 plasmids containing the FnPSP1 target site. Typical reactions contained 100 ng of DNA substrate, 250 nM of Cas12b protein, 500 nM of RNA and a final 1× reaction buffer of 20 mM TRIS pH 6.5, 6 mM MgCl2. Reactions were quenched with 20 mM EDTA, RNA digested with 5 ug RNAse A (Qiagen) at 370 for 5 min, and DNA products purified using a PCR cleanup kit (Qiagen). Reactions were run on Novex 10% TBE PAGE gels in 1×TBE buffer (Thermo Fisher Scientific) and stained with SYBR Gold (Thermo Fisher Scientific). Labelled DNA substrates were generated with IR700 and IR800 conjugated DNA oligonucleotides (IDT). For denaturing gels, DNA was mixed with an equal volume of 100% formamide followed by heat denaturation at 95° C. for 5 min. Products were separated on Novex Urea-PAGE gels (Thermo Fisher Scientific) in 1×TBE buffer pre-heated to 60° C. and were imaged on an Odyssey CLx device (LI-COR). Where applicable, quantitation of DNA cleavage or nicking was determined by the formula, 100×(1−sqrt(1−(b+c)/(a+b+c))), where a is the integrated intensity of the undigested product and b and c are the integrated intensities of each cleavage or nicking product.

### Mammalian Expression Constructs and Mutagenesis

[1673] Cas12b genes were amplified from their corresponding pACYC184 plasmids and cloned into pCDNA3.1 containing N- and C-terminal NLS tags and a C-terminal 3×HA tag. Guide expression plasmids were generated by cloning sgRNA scaffolds containing two inverted BsmBI Type IIS restriction sites behind the U6 promoter. Guides were cloned into the scaffolds by Golden Gate assembly with two annealed complementary oligonucleotides. Unless noted, all guides were 23-nt in length. Desired Cas12b mutations were ordered on oligonucleotides to generate two overlapping Cas12b PCR products which were assembled using Gibson Assembly Master Mix (NEB). The guide sequences used are shown in Table 31 below.

TABLE 31

| Gene | Target | 5′ PAM | Sequence |
|---|---|---|---|
| DNMT1 | 1 | GTTCT | AGACCCAGAGGCTCAAGTGAGCA |
| | | | (SEQ ID NO: 592) |
| DNMT1 | 2 | ATTTT | AGCTGAAGGGAAATAAAAGGAAA |
| | | | (SEQ ID NO: 593) |
| VEGFA | 3 | ATTCT | TCTCCCCTGGGAAGCATCCCTGG |
| | | | (SEQ ID NO: 594) |
| ENDO | 4 | ATTTT | TCATGGAGAAAATATTCAGAATC |
| | | | (SEQ ID NO: 595) |
| DNMT1 | 5 | TTTC | CCTCACTCCTGCTCGGTGAATTT |
| | | | (SEQ ID NO: 596) |
| DNMT1 | 6 | TTTG | AGGAGTGTTCAGTCTCCGTGAAC |
| | | | (SEQ ID NO: 597) |
| VEGFA | 7 | TTTG | GGAGGTCAGAAATAGGGGGTCCA |
| | | | (SEQ ID NO: 598) |
| VEGFA | 8 | TTTC | CAAAGCCCATTCCCTCTTTAGCC |
| | | | (SEQ ID NO: 599) |
| DNMT1 | 9 | ATTT | CCCTTCAGCTAAAATAAAGGAGG |
| | | | (SEQ ID NO: 600) |
| VEGFA | 10 | ATTC | TTCTCCCCTGGGAAGCATCCCTG |
| | | | (SEQ ID NO: 601) |
| GRIN2B | 11 | ATTC | TGCAGAGCAAATACCAGAGATAA |
| | | | (SEQ ID NO: 602) |
| PDCD1 | 12 | ATTG | CGCCGGGCCCTGACCACGCTCAT |
| | | | (SEQ ID NO: 603) |
| CXCR4 | 13 | ATTC | CCGACTTCATCTTTGCCAACGTC |
| | | | (SEQ ID NO: 604) |
| ENDO | 14 | ATTT | TAGAGCACTGGCATGGGGATGGG |
| | | | (SEQ ID NO: 605) |
| ENDO | 15 | ATTC | TTGCTCCAGAGGCCCCCCTTGGG |
| | | | (SEQ ID NO: 606) |
| DNMT1 | 16 | ATTC | CTGGTGCCAGAAACAGGGGTGAC |
| | | | (SEQ ID NO: 607) |
| CXCR4 | 17 | ATTC | TGGGCTTCAAGCAACTTGTAGTG |
| | | | (SEQ ID NO: 608) |
| CXCR4 | 18 | ATTT | TGTAATTGGTTCTACCAAAGAAG |
| | | | (SEQ ID NO: 609) |
| CXCR4 | 19 | ATTT | AGAGGCGGAGGGCGGCGTGCCTG |
| | | | (SEQ ID NO: 610) |
| GRIN2B | 20 | TTTC | CTTCAGCCCAAGAACAGTACAAG |
| | | | (SEQ ID NO: 611) |
| CXCR4 | 21 | TTTC | TCTGTGAGTCGAGGAGAAACGAC |
| | | | (SEQ ID NO: 612) |
| HPRT1 | 22 | TTTC | CTTGGGTGTGTTAAAAGTGACCA |
| | | | (SEQ ID NO: 613) |
| DNMT1 | 23 | - | TCACTCCTGCTCGGTGAATT |
| | | | (SEQ ID NO: 614) |
| ENDO | 24 | - | GCTACAGGCAGAGACAAAGG |
| | | | (SEQ ID NO: 615) |
| VEGFA | 25 | - | AGGTCAGAAATAGGGGGTCC |
| | | | (SEQ ID NO: 616) |
| VEGFA | 26 | - | CAGGCTGTGAACCTTGGTGG |
| | | | (SEQ ID NO: 617) |
| VEGFA | 27 | - | GACCCCCTCCACCCCGCCTC |
| | | | (SEQ ID NO: 618) |
| GRIN2B | 28 | - | GTATCTAGCCTCTTCTAAGAC |
| | | | (SEQ ID NO: 619) |
| VEGFA | 29 | - | TCTCCCCTGGGAAGCATCCC |
| | | | (SEQ ID NO: 620) |
| ENDO | 30 | - | GAGTCCGAGCAGAAGAAGAA |
| | | | (SEQ ID NO: 621) |
| TUBB | 31 | - | TTTTGGGAGTAAGAAAAGGT |
| | | | (SEQ ID NO: 622) |
| VEGFA | 32 | - | AGTGTCCAGGGATGCTTCCC |
| | | | (SEQ ID NO: 623) |
| DNMT1 | 33 | TTTC | CCTCACTCCTGCTCGGTGAATTT |
| | | | (SEQ ID NO: 624) |
| VEGFA | 34 | TTTG | GGAGGTCAGAAATAGGGGGTCCA |
| | | | (SEQ ID NO: 625) |
| ENDO | 35 | TTTG | GATGGCGACTTCAGGCACAGGAT |
| | | | (SEQ ID NO: 626) |
| ENDO | 36 | TTTG | GGAAGTGTCCAGGGATGCTTCCC |
| | | | (SEQ ID NO: 627) |
| DNMT1 | 37 | ATTT | CCCTTCAGCTAAAATAAAGGAGG |
| | | | (SEQ ID NO: 628) |
| DNMT1 | 38 | ATTT | GGCTCAGCAGGCACCTGCCTCAG |
| | | | (SEQ ID NO: 629) |
| VEGFA | 39 | ATTT | GGGACTGGAGTTGCTTCATGTAC |
| | | | (SEQ ID NO: 630) |
| ENDO | 40 | ATTT | TCTCCATGAAAAATACTGGGGTC |
| | | | (SEQ ID NO: 631) |
| ENDO | 41 | ATTT | TTCATGGAGAAAATATTCAGAAT |
| | | | (SEQ ID NO: 632) |
| GRIN2B | 42 | ATTG | GCAGCTACAGGCAGAGACAAAGG |
| | | | (SEQ ID NO: 633) |
| ENDO | 43 | ATTT | CCTGGAAACCATCCAGGCCTTGT |
| | | | (SEQ ID NO: 634) |
| DNMT1 | 44 | ATTG | GGTCAGCTGTTAACATCAGTACG |
| | | | (SEQ ID NO: 635) |
| CXCR4 | 45 | ATTT | TCTTCACGGAAACAGGGTTCCTT |
| | | | (SEQ ID NO: 636) |
| ENDO | 46 | TTTG | TGGTTGCCCACCCTAGTCATTGG |
| | | | (SEQ ID NO: 637) |
| ENDO | 47 | TTTG | GATGGCGACTTCAGGCACAGGAT |
| | | | (SEQ ID NO: 638) |
| DNMT1 | 49 | TTTC | CCTCACTCCTGCTCGGTGAATTT |
| | | | (SEQ ID NO: 639) |
| VEGFA | 50 | TTTG | GGAAGTGTCCAGGGATGCTTCCC |
| | | | (SEQ ID NO: 640) |
| DNMT1 | 51 | ATTT | GGCTCAGCAGGCACCTGCCTCAG |
| | | | (SEQ ID NO: 641) |
| ENDO | 52 | ATTT | TTCATGGAGAAAATATTCAGAAT |
| | | | (SEQ ID NO: 642) |
| VEGFA | 53 | ATTT | CTGACCTCCCAAACAGCTACATA |
| | | | (SEQ ID NO: 643) |

### Cell Culture and Transfections

[1674] HEK293T cells (ATCC) were cultured in Dulbecco's Modified Eagle Medium with high glucose, sodium pyruvate, and GlutaMAX (Thermo Fisher Scientific), lx penicillin-streptomycin (Thermo Fisher Scientific), and 10% fetal bovine serum (Seradigm). Cells were maintained at a confluency below 90% and tested negative for mycoplasma using the MycoAlert detection kit (Lonza). For indel analysis, 96-well plates were seeded with 17,500 cells/well approximately 16 hours before transfection for a confluency of approximately 75% at the time of transfection. Each 96-well was transfected with 100 ng of nuclease expressing plasmid and 100 ng of guide plasmid in 20 uL of Opti-MEM (Thermo Fisher Scientific) with 0.6 uL of TransIt-LT 1 transfection reagent (Mirus). Cells were harvested 72 h post-transfection with QuickExtract DNA extraction solution (Lucigen).

[1675] For HDR experiments, 100 ng of nuclease, 100 ng of guide and 100 ng of ssODNs were transfected per 96-well with 0.9 uL of TransIt-LT1 transfection reagent (Mirus). ssODNs were ordered as Ultramer DNA oligonucleotides (IDT) and contained 3 phosphorothioate modification on each end.

### Deep Sequencing of Indel Mutations

[1676] Targeted indel analysis was performed by amplifying genomic regions of interest with NEBNext High-Fidelity 2×PCR Master Mix (NEB) using a two-round PCR strategy to add Illumina P5 adaptors and unique sample-specific barcodes. Libraries were sequenced with 1×200 cycle MiSeq runs (Illumina). Indel rates were measured using Outknocker 2²⁵. (www.outknocker.org/outknocker2.htm).

### Off-Target Analysis

[1677] Off-target cleavage sites were identified using Guide-Seq with modified library preparation. Briefly, cells were transfected in 96-well plates with 75 ng nuclease plasmid, 25 ng guide plasmid, and 100 ng annealed dsDNA oligos in 50 uL Opti-MEM with 0.5 uL GeneJuice Transfection Reagent (Millipore).

F:
(SEQ ID NO: 644)
/5phos/G*T*TGTGAGCAAGGGCGAGGAGGATAACGCCTCTCTCCCAGC
GACT*A*T
R:
(SEQ ID NO: 645)
/5phos/A*T*AGTCGCTGGGAGAGAGGCGTTATCCTCCTCGCCCTTGCT
CACA*A*C

[1678] Cells were harvested after 72 hr and 10 wells were pooled for each experiment. 1E6 cells were lysed and genomic DNA was tagmented with Tn5 followed by purification using a plasmid mini-prep column (Qiagen). Libraries were prepared using two rounds of PCR amplification with KOD Hot Start DNA Polymerase (Millipore) using a Tn5 adapter-specific primer and nested primers within the DNA donor. Libraries were sequenced with a 75-cycle NextSeq kit (Illumina). Reads were mapped to the human genome (hg38) using BrowserGenome.org26

### T Cells Culture

[1679] Human CD4+ T cells (STEMCELL Technologies) were cultured in RMPI 1640 (Glutamax Supplement, Gibco) supplemented with 5 mM HEPES, pH 8.0 (Gibco), 50 ug/mL penicillin/streptomycin (Gibco), 50 uM 2-mercaptoethanol (Sigma-Aldrich), 5 mM MEM non-essential amino acids (Gibco), 5 mM sodium pyruvate (Gibco) and 10% FBS (Seradigm). Cells were activated for 5-7 days post thaw by plating every two days on dishes coated with 10 ug/mL of anti-CD3 (UCHT1, eBioscience, Invitrogen) and anti-CD28 (CD28.2, eBioscience, Invitrogen) monoclonal antibodies.

### RNP Complexing and Delivery

[1680] BhCas12b sgRNA were synthesized with three 2′O-methyl modifications at 3′ end (Integrated DNA Technologies). RNPs were formed by incubating 10 mg/mL protein with 50 uM annealed RNA at a 1:1 molar ratio at 37° C. for 15 min. RNPs were stored on ice until electroporation.

[1681] Cells were electroporated using the Amaxa P3 Primary Cell 4D-Nucleofector X Kit (Lonza). Per reaction, 3×10⁵ stimulated CD4+ T cells were pelleted and resuspended in 20 uL P3 buffer. 4.5 uM Cas9 or Cas12b protein, precomplexed with crRNA and tracrRNA, was added and the mixture transferred to the electroporation cuvette. Cells were electroporated using program EH-115 on the Amaxa 4D-Nucleofector (Lonza). 80 uL of prewarmed complete media was immediately added to the cells post-pulse and the cells were incubated at 37 C for 30 minutes to recover in the cuvette. After recovery, 50 uL of the cell suspension was added to 50 uL of complete medium plus 80 IU/mL IL-2 (STEMCELL Technologies) for a final concentration of 40 IU/mL IL-2. The cells were plated on CD3/CD28 precoated 96-well plates. Cells were harvested after 48 hours for indel analysis.

### REFERENCES

[1682] 1 Shmakov, S. et al. Discovery and Functional Characterization of Diverse Class 2 CRISPR-Cas Systems. Mol Cell 60, 385-397, doi:10.1016/j.molcel.2015.10.008 (2015).
[1683] 2 Seuylemezian, A., Cooper, K., Schubert, W. & Vaishampayan, P. Draft Genome Sequences of 12 Dry-Heat-Resistant Bacillus Strains Isolated from the Cleanrooms Where the Viking Spacecraft Were Assembled. Genome announcements 6, doi:10.1128/genomeA.00094-18(2018).
[1684] 3 Knott, G. J. & Doudna, J. A. CRISPR-Cas guides the future of genetic engineering. Science 361, 866-869, doi:10.1126/science.aat5011 (2018).
[1685] 4 Hsu, P. D., Lander, E. S. & Zhang, F. Development and Applications of CRISPR-Cas9 for Genome Engineering. Cell 157, 1262-1278, doi:10.1016/j.cell.2014.05.010 (2014).
[1686] 5 Cong, L. et al. Multiplex Genome Engineering Using CRISPR/Cas Systems. Science 339, 819-823, doi:10.1126/science.1231143 (2013).
[1687] 6 Mali, P. et al. RNA-Guided Human Genome Engineering via Cas9. Science 339, 823-826, doi:10.1126/science.1232033 (2013).
[1688] 7 Deltcheva, E. et al. CRISPR RNA maturation by trans-encoded small RNA and host factor RNase III. Nature 471, 602-607, doi:10.1038/nature09886 (2011).
[1689] 8 Bolotin, A., Ouinquis, B., Sorokin, A. & Ehrlich, S. D. Clustered regularly interspaced short palindrome repeats (CRISPRs) have spacers of extrachromosomal origin. Microbiol-Sgm 151, 2551-2561, doi:10.1099/mic.0.28048-0 (2005).
[1690] 9 Makarova, K. S., Grishin, N. V., Shabalina, S. A., Wolf, Y. I. & Koonin, E. V. A putative RNA-interference-based immune system in prokaryotes: computational analysis of the predicted enzymatic machinery, functional analogies with eukaryotic RNAi, and hypothetical mechanisms of action. Biol Direct 1, doi:Artn 710.1186/1745-6150-1-7 (2006).
[1691] 10 Zetsche, B. et al. Cpf1 is a single RNA-guided endonuclease of a class 2 CRISPR-Cas system. Cell 163, 759-771, doi:10.1016/j.cell.2015.09.038 (2015).
[1692] 11 Shmakov, S. et al. Diversity and evolution of class 2 CRISPR-Cas systems. Nat Rev Microbiol 15, 169-182, doi:10.1038/nrmicro.2016.184 (2017).
[1693] 12 Cox, D. B. T. et al. RNA editing with CRISPR-Cas13. Science 358, 1019-1027, doi:10.1126/science.aaq0180 (2017).
[1694] 13 Hsu, P. D. et al. DNA targeting specificity of RNA-guided Cas9 nucleases. Nat Biotechnol31, 827-+, doi:10.1038/nbt.2647 (2013).
[1695] 14 Yang, H., Gao, P., Rajashankar, K. R. & Patel, D. J. PAM-Dependent Target DNA Recognition and Cleavage by C2c1 CRISPR-Cas Endonuclease. Cell 167, 1814-1828 e1812, doi:10.1016/j.cell.2016.11.053 (2016).
[1696] 15 Wu, D., Guan, X., Zhu, Y., Ren, K. & Huang, Z. Structural basis of stringent PAM recognition by CRISPR-C2c1 in complex with sgRNA. Cell Res 27, 705-708, doi:10.1038/cr.2017.46 (2017).
[1697] 16 Suzuki, M. A framework for the DNA-protein recognition code of the probe helix in transcription factors: the chemical and stereochemical rules. Structure (London, England: 1993) 2, 317-326 (1994).
[1698] 17 Mavromatis, K., Tsigos, I., Tzanodaskalaki, M., Kokkinidis, M. & Bouriotis, V. Exploring the role of a glycine cluster in cold adaptation of an alkaline phosphatase. Eur J Biochem 269, 2330-2335 (2002).
[1699] 18 Saavedra, H. G., Wrabl, J. O., Anderson, J. A., Li, J. & Hilser, V. J. Dynamic allostery can drive cold adaptation in enzymes. Nature 558, 324-+, doi:10.1038/s41586-018-0183-2 (2018).
[1700] 19 Tsai, S. Q. et al. GUIDE-seq enables genome-wide profiling of off-target cleavage by CRISPR-Cas nucleases. NatBiotechnol33, 187-197, doi:10.1038/nbt.3117 (2015).
[1701] 20 Fu, Y. F. et al. High-frequency off-target mutagenesis induced by CRISPR-Cas nucleases in human cells. Nat Biotechnol 31, 822-+, doi:10.1038/nbt.2623 (2013).
[1702] 21 Liu, L. et al. C2c1-sgRNA Complex Structure Reveals RNA-Guided DNA Cleavage Mechanism. Mol Cell 65, 310-322, doi:10.1016/j.molce.2016.11.040 (2017).
[1703] 22 Leenay, R. T. et al. Identifying and Visualizing Functional PAM Diversity across CRISPR-Cas Systems. Molecular Cell 62, 137-147, doi:10.1016/j.molce.2016.02.031 (2016).
[1704] 23 Edgar, R. C. MUSCLE: multiple sequence alignment with high accuracy and high throughput. Nucleic Acids Res 32, 1792-1797, doi:10.1093/nar/gkh340 (2004).
[1705] 24 Guindon, S. & Gascuel, O. A simple, fast, and accurate algorithm to estimate large phylogenies by maximum likelihood. SystBiol52, 696-704 (2003).
[1706] 25 Schmid-Burgk, J. L. et al. OutKnocker: a web tool for rapid and simple genotyping of designer nuclease edited cell lines. Genome Res 24, 1719-1723, doi:10.1101/gr.176701.114 (2014).
[1707] 26 Schmid-Burgk, J. L. & Hornung, V. BrowserGenome.org: web-based RNA-seq data analysis and visualization. NatMethods 12, 1001, doi:10.1038/nmeth.3615 (2015).
[1708] Jinek, M. et al. A Programmable Dual-RNA-Guided DNA Endonuclease in Adaptive Bacterial Immunity. Science 337, 816-821 (2012).
[1709] Teng, F. et al. Repurposing CRISPR-Cas12b for mammalian genome engineering. Cell Discov 4, 63 (2018).

### Example 26

[1710] FIG. 58 shows Cas12b (C2c1) structure (based on PDB structure 5U30). The figure shows the structurally predicted ssDNA path, and a domain that may be removed, in part or in whole, to access additional ssDNA.

### Example 27

[1711] Mutations in ADAR affecting ADAR activity were screened using yeast screening. The screen was performed in multiple rounds. Each round of screening yielded a set of candidate mutations. The candidate mutations were then validated in mammalian cells. The top-performing mutations were added to the last version of mutations and re-screened. The mutations screened in 10 rounds are shown in Table 32 below. The mutant identified in round n was designated as “RESCUE vn-1.” As discussed herein RESCUE refer to mutations that convert adenosine deaminase activity to cytidine deaminase activity.

TABLE 32

| RESCUE | | |
|---|---|---|
| Round | ADAR mutations | Plasmid |
| RESCUEv0 | E488Q | pAB0048 |
| RESCUEv1 | E488Q, V351G | pAB0359 |
| RESCUEv2 | E488Q, V351G, S486A | pAB1188 |
| RESCUEv3 | E488Q, V351G, S486A, T375S | pAB0642 |
| RESCUEv4 | E488Q, V351G, S486A, T375S, S370C, | pAB1072 |
| RESCUEv5 | E488Q, V351G, S486A, T375S, S370C, P462A | pAB1135 |
| RESCUEv6 | E488Q, V351G, S486A, T375S, S370C, P462A, N597I | pAB1146 |
| RESCUEv7 | E488Q, V351G, S486A, T375S, S370C, P462A, N597I, L332I | pAB1194 |
| RESCUEv8 | E488Q, V351G, S486A, T375S, S370C, P462A, N597I, L332I, | pAB1220 |
| | I398V | |
| RESCUEv9 | E488Q, V351G, S486A, T375S, S370C, P462A, N597I, L332I, | pAB1327 |
| | I398V, K3501 | |

[1712] Dose responses of the RESCUE mutants were tested on the T motif (FIG. 59) and C and G motifs (FIG. 60). Endogenous targeting with RESCUE v3, v6, v7, and v8 was tested (FIGS. 61 and 62).

[1713] Screening for mutations for RESCUE v9 was performed (FIG. 63). Potential mutations for RESCUEv9 were identified (FIG. 64). Base flip and motif testing were performed (FIG. 65). Effects of RESCUEv9 was tested on different motif flip (FIG. 66). The data suggests v9 worked better with C-flip guides. Comparison between B6 and B12 with RESCUE v1 and v8 were performed with 50 bp guides (FIG. 67 and 30 bp guides (FIG. 68).

### Example 28

[1714] This example summarizes the results of RESCUE rounds 1-12 (see FIGS. 69-80). Additional phenotypes tested included PCSK9, Stat3, IRS1, and TFEB. PCSK9 showed cloning improved the promoter. Stat3 showed ˜10% editing on sites. Inhibition of signaling will be tested with a luciferase reporter. For IRS1, targeting of synthetic site will be tested before moving to pre-adipocyte cells. For TFEB, targeting may be designed to cause translocation of transcription factor->autophagy. In addition, a panel of 12 endogenous phosphosite targets and 48 synthetic targets will be tested. Screening in yeast will continue on V11 background with S22P. Top hits were screened on V12 for V13 and new rounds of yeast hits will be evaluated. A few hundred additional screen hits on luciferase will be evaluated and Ade2 editing will be validated for specificity screening. Gene shuffling will also be tested for library complexity and different yeast reporters.

### Example 29

[1715] This example demonstrates an exemplary approach for base editing using Cas12b and variants thereof and a deaminase.

[1716] FIGS. 81, 83-86 show Cas12b Bhv4 truncations with C to T base editing capabilities. After removing the C-terminal 142 amino acids of catalytically inactive Bhv4 (dBhv4Δ142-inactivating mutation D574A, new total size 966 amino acids) and fusing a linker and rat Apobec domain to the C-terminal end, C to T base editing was observed with frequencies up to 10.95% at guide base pair position 14 on the nontarget strand. A 6.97% editing efficiency was detected at guide position 15. This activity was guide dependent. The addition of the uracil-DNA glycosylase inhibitor (UGI) domain, either through fusion to the existing construct or free expression, increases this C to T conversion. The listed guide sequence (capitalized letters) targets a region inside GRIN2 in HEK293T cells.

[1717] FIG. 87 shows an exemplary base editing approach using full-length BhCas12b. A second NLS sequence was added to N-terminal rApobec to distance the domains from each other.

### Example 30

[1718] FIG. 88A shows comparison between indel activity of BhCas12b v4 and another ortholog AaCas12b (as described in Teng F. et al., Repurposing CRISPR-Cas12b for mammalian genome engineering in HEK293T cells. FIGS. 88B and 88C demonstrate the transduction of rat neurons with AAV1/2 expressing BhCas12b v4 or BhCas12b. This design exhibited higher activity as measured by indel activity. The polyA sequence was lengthened in the optimized vectors and the U6 promoter and sgRNA scaffold moved to the opposite strand.

[1719] The sequences in this study are shown in Table 33 below. A map of px602-bh-optimize-AAV is shown in FIG. 89A, and a map of px602-bv-optimize-AAV is show in FIG. 89B.

TABLE 33

| Sequence Names | Sequences |
|---|---|
| BhCas12b Mecp2 target | TACTTTAGAGCGAAAGGCTTTTC |
| (SEQ ID NO: 646): | |
| BhCas12b Map2 target | AGATACCAAAGAGAACGGGATCA |
| (SEQ ID NO: 647): | |
| BvCas12b Mecp2 target | TGACTTCACTGTAACTGGGAGAG |
| (SEQ ID NO: 648): | |
| BvCas12b Map2 target | TCTCCCAGGAAGGGCAGCAGGCT |
| (SEQ ID NO: 649): | |
| BvCas12b NeuN target | TAGACGTGGAGATCATTTTTAAC |
| (SEQ ID NO: 650): | |
| original polyA | Aataaaatatctttattttcattacatctgtgtgttggttttttgtgtg |
| (SEQ ID NO: 651): | |
| bGH polyA (optimized | Ctgtgccttctagttgccagccatctgttgtttgcccctcccccgtgccttccttgaccctggaa |
| construct) | ggtgccactcccactgtcctttcctaataaaatgaggaaattgcatcgcattgtctgagtaggtg |
| (SEQ ID NO: 652): | tcattctattctggggggtggggtggggcaggacagcaagggggaggattgggaagagaatagca |
| | ggcatgctgggga |
| NLS-AaCas12b-NLS-3xHA | MAPKKKRKVGIHGVPAAAVKSMKVKLRLDNMPEIRAGLWKLHTEVNAGVRYYTEWLSLLRQENLY |
| (SEQ ID NO: 653) | RRSPNGDGEQECYKTAEECKAELLERLRARQVENGHCGPAGSDDELLQLARQLYELLVPQAIGAK |
| | GDAQQIARKFLSPLADKDAVGGLGIAKAGNKPRWVRMREAGEPGWEEEKAKAEARKSTDRTADVL |
| | RALADFGLKPLMRVYTDSDMSSVQWKPLRKGQAVRTWDRDMFQQAIERMMSWESWNQRVGEAYAK |
| | LVEQKSRFEQKNFVGQEHLVQLVNQLQQDMKEASHGLESKEQTAHYLTGRALRGSDKVFEKWEKL |
| | DPDAPFDLYDTEIKNVQRRNTRRFGSHDLFAKLAEPKYQALWREDASFLTRYAVYNSIVRKLNHA |
| | KMFATFTLPDATAHPIWTRFDKLGGNLHQYTFLFNEFGEGRHAIREQKLLTVEDGVAKEVDDVTV |
| | PISMSAQLDDLLPRDPHELVALYFQDYGAEQHLAGEFGGAKIQYRRDQLNHLHARRGARDVYLNL |
| | SVRVQSQSEARGERRPPYAAVFRLVGDNHRAFVHFDKLSDYLAEHPDDGKLGSEGLLSGLRVMSV |
| | DLGLRTSASISVFRVARKDELKPNSEGRVPFCFPIEGNENLVAVHERSQLLKLPGETESKDLRAI |
| | REERQRTLRQLRTQLAYLRLLVRCGSEDVGRRERSWAKLIEQPMDANQMTPDWREAFEDELQKLK |
| | SLYGICGDREWTEAVYESVRRVWRHMGKQVRDWRKDVRSGERPKIRGYQKDVVGGNSIEQIEYLE |
| | RQYKFLKSWSFFGKVSGQVIRAEKGSRFAITLREHIDHAKEDRLKKLADRIIMEALGYVYALDDE |
| | RGKGKWVAKYPPCQLILLEELSEYQFNNDRPPSENNQLMQWSHRGVFQELLNQAQVHDLLVGTMY |
| | AAFSSRFDARTGAPGIRCRRVPARCAREQNPEPFPWWLNKFVAEHKLDGCPLRADDLIPTGEGEF |
| | FVSPFSAEEGDFHQIHADLNAAQNLQRRLWSDFDISQIRLRCDWGEVDGEPVLIPRTTGKRTADS |
| | YGNKVFYTKTGVTYYERERGKKRRKVFAQEELSEEEAELLVEADEAREKSVVLMRDPSGIINRGD |
| | WTRQKEFWSMVNQRIEGYLVKQIRSRVRLQESACENTGDIKRPAATKKAGQAKKKKGSYPYDVPD |
| | YAYPYDVPDYAYPYDVPDYA* |
| px602-bh-optimize-AAV | cctgcaggcagctgcgcgctcgctcgctcactgaggccgcccgggcgtcgggcgacctttggtcg |
| (SEQ ID NO: 654) | cccggcctcagtgagcgagcgagcgcgcagagagggagtggccaactccatcactaggggttcct |
| | gcggcctctagactcgaggggctggaagctacctttgacatcatttcctctgcgaatgcatgtat |
| | aatttctacagaacctattagaaaggatcacccagcctctgatttgtacaactttccataaaaaa |
| | ctgccaattccactgctgtttggcccaatagtgagaactttttcctgctgcctcttggtgctttt |
| | gcctatggcccctattctgcctgctgaagacactatgccagcatggacttaaacccctccagctc |
| | tgacaatcctattctcttttgttttacatgaagggtctggcagccaaagcaatcactcaaagttc |
| | aaaccttatcattttttgattgttcctcttggccttggttttgtacatcagctttgaaaatacca |
| | tcccagggttaatgctggggttaatttataactaagagtgctctagttttgcaatacaggacatg |
| | ctataaaaatggaaagataccggtgccacAAGAGGTAAGGGTTTAAGGGATGGTTGGTTGGTGGG |
| | GTATTAATGTTTAATTACCTGGAGCACCTGCCTGAAATCACTTTTTTTCAGGTTGGcatggcccc |
| | aaagaagaagcggaaggtcggtatccacggagtcccagcagccgccaccagatccttcatcctga |
| | agatcgagcccaacgaggaagtgaagaaaggcctctggaaaacccacgaggtgctgaaccacgga |
| | atcgcctactacatgaatatcctgaagctgatccggcaagaggccatctacgagcaccacgagca |
| | ggaccccaagaatcccaagaaggtgtccaaggccgagatccaggccgagctgtgggatttcgtgc |
| | tgaagatgcagaagtgcaacagatcacacacgaggtggacaaggacgaggtgttcaacatcctga |
| | gagagctgtacgaggaactggtgcccagcagcgtggaaaagaagggcgaagccaaccagctgagc |
| | aacaagtttctgtaccctctggtggaccccaacagccagtctggaaagggaacagccagcagcgg |
| | cagaaagcccagatggtacaacctgaagattgccggcgatccctcctgggaagaagagaagaaga |
| | agtgggaagaagataagaaaaaggacccgctggccaagatcctgggcaagctggctgagtacgga |
| | ctgatccctctgttcatcccctacaccgacagcaacgagcccatcgtgaaagaaatcaagtggat |
| | ggaaaagtcccggaaccagagcgtgcggcggctggataaggacatgttcattcaggccctggaac |
| | ggttcctgagctgggagagctggaacctgaaagtgaaagaggaatacgagaaggtcgagaaagag |
| | tacaagaccctggaagagaggatcaaagaggacatccaggctctgaaggctctggaacagtatga |
| | gaaagagcggcaagaacagctgctgcgggacaccctgaacaccaacgagtaccggctgagcaaga |
| | gaggccttagaggctggcgggaaatcatccagaaatggctgaaaatggacgagaacgagccctcc |
| | gagaagtacctggaagtgttcaaggactaccagcggaagcaccctagagaggccggcgattacag |
| | cgtgtacgagttcctgtccaagaaagagaaccacttcatctggcggaatcaccctgagtacccct |
| | acctgtacgccaccttctgcgagatcgacaagaaaaagaaggacgccaagcagcaggccaccttc |
| | acactggccgatcctatcaatcaccctctgtgggtccgattcgaggaaagaagcggcagcaacct |
| | gaacaagtacagaatcctgaccgagcagctgcacaccgagaagctgaagaaaaagctgacagtgc |
| | agctggaccggctgatctaccctacagaatctggcggctgggaagagaagggcaaagtggacatt |
| | gtgctgctgcccagccggcagttctacaaccagatcttcctggacatcgaggaaaagggcaagca |
| | cgccttcacctacaaggatgagagcatcaagttccctctgaagggcacactcggcggagccagag |
| | tgcagttcgacagagatcacctgagaagataccctcacaaggtggaaagcggcaacgtgggcaga |
| | atctacttcaacatgaccgtgaacatcgagcctacagagtccccagtgtccaagtctctgaagat |
| | ccaccgggacgacttccccaaggtggtcaacttcaagcccaaagaactgaccgagtggatcaagg |
| | acagcaagggcaagaaactgaagtccggcatcgagtccctggaaatcggcctgagagtgatgagc |
| | atcgacctgggacagagacaggccgctgccgcctctattttcgaggtggtggatcagaagcccga |
| | catcgaaggcaagctgtttttcccaatcaagggcaccgagctgtatgccgtgcacagagccagat |
| | caacatcaagctgcccggcgagacactggtcaagagcagagaagtgctgcggaaggccagagagg |
| | acaatctgaaactgatgaaccagaagctcaacttcctgcggaacgtgctgcacttccagcagttc |
| | gaggacatcaccgagagagagaagcgggtcaccaagtggatcagcagacaagagaacagcgacgt |
| | gcccctggtgtaccaggatgagctgatccagatccgcgagctgatgtacaagccttacaaggact |
| | gggtcgccttcctgaagcagctccacaagagactggaagtcgagatcggcaaagaagtgaagcac |
| | tggcggaagtccctgagcgacggaagaaagggcctgtacggcatctccctgaagaacatcgacga |
| | gatcgatcggacccggaagttcctgctgagatggtccctgaggcctaccgaacctggcgaagtgc |
| | gtagactggaacccggccagagattcgccatcgaccagctgaatcacctgaacgccctgaaagaa |
| | gatcggctgaagaagatggccaacaccatcatcatgcacgccctgggctactgctacgacgtgcg |
| | gaagaagaaatggcaggctaagaaccccgcctgccagatcatcctgttcgaggatctgagcaact |
| | acaacccctacgaggaaaggtcccgcttcgagaacagcaagctcatgaagtggtccagacgcgag |
| | atccccagacaggttgcactgcagggcgagatctatggcctgcaagtgggagaagtgggcgctca |
| | gttcagcagcagattccacgccaagacaggcagccctggcatcagatgtagcgtcgtgaccaaag |
| | agaagctgcaggacaatcggttcttcaagaatctgcagagagagggcagactgaccctggacaaa |
| | atcgccgtgctgaaagagggcgatctgtacccagacaaaggcggcgagaagttcatcagcctgag |
| | caaggatcggaagtgcgtgaccacacacgccgacatcaacgccgctcagaacctgcagaagcggt |
| | tctggacaagaacccacggcttctacaaggtgtactgcaaggcctaccaggtggacggccagacc |
| | gtgtacatccctgagagcaaggaccagaagcagaagatcatcgaagagttcggcgagggctactt |
| | cattctgaaggacggggtgtacgaatgggtcaacgccggcaagctgaaaatcaagaagggcagct |
| | ccaagcagagcagcagcgagctggtggatagcgacatcctgaaagacagcttcgacctggcctcc |
| | gagctgaaaggcgaaaagctgatgctgtacagggaccccagcggcaatgtgttccccagcgacaa |
| | atggatggccgctggcgtgttcttcggaaagctggaacgcatcctgatcagcaagctgaccaacc |
| | agtactccatcagcaccatcgaggacgacagcagcaagcagtctatgaaaaggccggcggccacg |
| | aaaaaggccggccaggcaaaaaagaaaaagggatcctacccatacgatgttccagattacgctta |
| | tccctacgacgtgcctgattatgcatacccatatgatgtccccgactatgcctaagaattcctag |
| | agctcgctgatcagcctcgactgtgccttctagttgccagccatctgttgtttgcccctcccccg |
| | tgccttccttgaccctggaaggtgccactcccactgtcctttcctaataaaatgaggaaattgca |
| | tcgcattgtctgagtaggtgtcattctattctggggggtggggtggggcaggacagcaaggggga |
| | ggattgggaagagaatagcaggcatgctggggacggccaaaaaaagagaccatatatggtctccg |
| | tgctaatgcctcgtaagagacatcgtccagcaataggagtttctcacaccctgcagcacttatag |
| | ctagacggttgtcctgaccaaaagacagaaccggtgtttcgtcctttccacaagatatataaagc |
| | caagaaatcgaaatactttcaagttacggtaagcatatgatagtccattttaaaacataatttta |
| | aaactgcaaactacccaagaaattattactttctacgtcacgtattttgtactaatatctttgtg |
| | tttacagtcaaattaattccaattatctctctaacagccttgtatcgtatatgcaaatatgaagg |
| | aatcatgggaaataggccctcgcggccgcaggaacccctagtgatggagttggccactccctctc |
| | tgcgcgctcgctcgctcactgaggccgggcgaccaaaggtcgcccgacgcccgggctttgcccgg |
| | gcggcctcagtgagcgagcgagcgcgcagctgcctgcaggggcgcctgatgcggtattttctcct |
| | tacgcatctgtgcggtatttcacaccgcatacgtcaaagcaaccatagtacgcgccctgtagcgg |
| | cgcattaagcgcggcgggtgtggtggttacgcgcagcgtgaccgctacacttgccagcgccctag |
| | cgcccgctcctttcgctttcttcccttcctttctcgccacgttcgccggctttccccgtcaagct |
| | ctaaatcgggggctccctttagggttccgatttagtgctttacggcacctcgaccccaaaaaact |
| | tgatttgggtgatggttcacgtagtgggccatcgccctgatagacggtttttcgcctttgacgtt |
| | ggagtccacgttctttaatagtggactcttgttccaaactggaacaacactcaaccctatctcgg |
| | gctattcttttgatttataagggattttgccgatttcggcctattggttaaaaaatgagctgatt |
| | taacaaaaatttaacgcgaattttaacaaaatattaacgtttacaattttatggtgcactctcag |
| | tacaatctgctctgatgccgcatagttaagccagccccgacacccgccaacacccgctgacgcgc |
| | cctgacgggcttgtctgctcccggcatccgcttacagacaagctgtgaccgtctccgggagctgc |
| | atgtgtcagaggttttcaccgtcatcaccgaaacgcgcgagacgaaagggcctcgtgatacgcct |
| | atttttataggttaatgtcatgataataatggtttcttagacgtcaggtggcacttttcggggaa |
| | atgtgcgcggaacccctatttgtttatttttctaaatacattcaaatatgtatccgctcatgaga |
| | caataaccctgataaatgatcaataatattgaaaaaggaagagtatgagtattcaacatttccgt |
| | gtcgccatattccatttttgcggcattttgccttcctgtttttgctcacccagaaacgctggtga |
| | aagtaaaagatgctgaagatcagttgggtgcacgagtgggttacatcgaactggatctcaacagc |
| | ggtaagatccttgagagttttcgccccgaagaacgttttccaatgatgagcacttttaaagttct |
| | gctatgtggcgcggtattatcccgtattgacgccgggcaagagcaactcggtcgccgcatacact |
| | attctcagaatgacttggttgagtactcaccagtcacagaaaagcatcttacggatggcatgaca |
| | gtaagagaattatgcagtgctgccataaccatgagtgataacactgcggccaacttacttctgac |
| | aacgatcggaggaccgaaggagctaaccgcttttttgcacaacatgggggatcatgtaactcgcc |
| | ttgatcgttgggaaccggagctgaatgaagccataccaaacgacgagcgtgacaccacgatgcct |
| | gtagcaatggcaacaacgttgcgcaaactattaactggcgaactacttactctagatcccggcaa |
| | caattaatagactggatggaggcggataaagttgcaggaccacttctgcgctcggccatccggct |
| | ggctggtttattgctgataaatctggagccggtgagcgtggaagccgcggtatcattgcagcact |
| | ggggccagatggtaagccctcccgtatcgtagttatctacacgacggggagtcaggcaactatgg |
| | atgaacgaaatagacagatcgctgagataggtgcctcactgattaagcattggtaactgtcagac |
| | caagtttactcatatatactttagattgatttaaaacttcatttttaatttaaaaggatctaggt |
| | gaagatcctttttgataatctcatgaccaaaatcccttaacgtgagttttcgttccactgagcgt |
| | cagaccccgtagaaaagatcaaaggatcttatgagatcctttttttctgcgcgtaatctgctgat |
| | gcaaacaaaaaaaccaccgctaccagcggtggtttgtttgccggatcaagagctaccaactattt |
| | tccgaaggtaactggcttcagcagagcgcagataccaaatactgtccttctagtgtagccgtagt |
| | taggccaccacttcaagaactctgtagcaccgcctacatacctcgctctgctaatcctgttacca |
| | gtggctgctgccagtggcgataagtcgtgtataccgggttggactcaagacgatagttaccggat |
| | aaggcgcagcggtcgggctgaacggggggttcgtgcacacagcccagcttggagcgaacgaccta |
| | caccgaactgagatacctacagcgtgagctatgagaaagcgccacgcttcccgaagggagaaagg |
| | cggacaggtatccggtaagcggcagggtcggaacaggagagcgcacgagggagatccagggggaa |
| | acgcctggtatctttatagtcctgtcgggtttcgccacctctgacttgagcgtcgatttttgtga |
| | tgctcgtcaggggggcggagcctatggaaaaacgccagcaacgcggcctttttacggttcctggc |
| | cttttgctggccttttgctcacatgt |
| px602-bv-optimize-AAV | cctgcaggcagctgcgcgctcgctcgctcactgaggccgcccgggcgtcgggcgacctttggtcg |
| (SEQ ID NO: 655) | cccggcctcagtgagcgagcgagcgcgcagagagggagtggccaactccatcactaggggttcct |
| | gcggcctctagactcgaggggctggaagctacctttgacatcatttcctctgcgaatgcatgtat |
| | aatttctacagaacctattagaaaggatcacccagcctctgatttgtacaactttccataaaaaa |
| | ctgccaattccactgctgtttggcccaatagtgagaactttttcctgctgcctcttggtgatttg |
| | cctatggcccctattctgcctgctgaagacactatgccagcatggacttaaacccctccagctct |
| | gacaatcctctttctcttttgttttacatgaagggtctggcagccaaagcaatcactcaaagttc |
| | aaaccttatcattttttgattgttcctcttggccttggttttgtacatcagctttgaaaatacca |
| | tcccagggttaatgctggggttaatttataactaagagtgctctagttttgcaatacaggacatg |
| | ctataaaaatggaaagataccggtgccaccatggccccaaagaagaagcggaaggtcggtatcca |
| | cggagtcccagcagccgccatccggtccatcaagctgaagatgaagaccaacagcggcaccgaca |
| | gcatctacctgagaaaagccctgtggcggacccaccagctgatcaatgagggaatcgcctactac |
| | atgaacctgctgaccctgtaccggcaagaggccatcggcgacaagaccaaagaagcctatcaggc |
| | cgagctgattaacatcatccggaaccagcagcggaacaacggcagctctgaggaacacggctccg |
| | accaagaaattctggccctgctgagacagctgtacgagctgatcatccccagcagcatcggcgaa |
| | tctggcgacgctaatcagctgggcaacaagtttctgtaccctctggtggaccccaacagccagtc |
| | tggcaagggcacatctaacgccggcagaaagcccagatggaagcggctgaaagaggaaggcaacc |
| | ccgactgggaactcgagaagaagaaggacgaggaacgcaaggccaaggatcccaccgtgaagatc |
| | tttgacaacctgaacaaatacggcctgctgcctctgttcccactgttcaccaacatccagaaaga |
| | catcgagtggctgcccctgggcaagagacagtctgtgcggaagtgggacaaagacatgttcatcc |
| | aggccatcgagagactgctgagctgggagagctggaacagaagagtggccgacgagtacaaacag |
| | ctgaaagaaaagaccgagagctactacaaagagcacctgacaggcggcgaggaatggatcgagaa |
| | gatccggaagttcgagaaagaacggaacatggaactggaaaagaacgccttcgctcccaacgacg |
| | gctacttcatcaccagcagacagatcagaggctgggacagagtgtacgagaagtggtccaagctg |
| | cccgagtctgctagccctgaggaactgtggaaagtggtggccgagcagcagaacaagatgtccga |
| | aggcttcggcgaccccaaggtgttcagcttcctggccaacagagagaaccgggacatttggagag |
| | gccacagcgagcggatctaccacattgccgcctacaacggcctgcagaagaagctgagccggacc |
| | aaagagcaggccaccttcacactgcctgacgccattgaacaccctctgtggatcagatacgagag |
| | ccctggcggcaccaacctgaatctgttcaagctggaagagaaacagaaaaagaactactacgtga |
| | ccctgagcaagatcatctggcccagcgaggaaaagtggattgagaaagagaacatcgagatccct |
| | ctggctcccagcatccagttcaaccggcagattaagctgaagcagcacgtgaagggcaagcaaga |
| | gatcagcttcagcgactacagcagccggatcagcctggatggtgttctcggcggcagcagaatcc |
| | agtttaatcggaagtacatcaagaaccacaaagagctgctcggagagggcgacatcggccccgtg |
| | ttctttaacctggtggtggatgtggcccctctgcaagaaaccagaaacggcagactgcagagccc |
| | catcggcaaggccctgaaagtgatcagcagcgacttctccaaagtgatcgactacaagccgaaag |
| | aactcatggattggatgaataccggcagcgccagcaacagctttggagtggcttctctgctggaa |
| | ggcatgagagtgatgagcatcgacatgggccagagaaccagcgcctccgtgtccatcttcgaggt |
| | cgtgaaagaactgcccaaggatcaagagcagaagctgttctacagcatcaacgacaccgagctgt |
| | tcgccatccacaagcggagctttctgctgaacctgcctggcgaggtggtcaccaagaacaacaag |
| | cagcagcggcaagagcggcggaaaaagcggcagtttgtgcggagccagatcagaatgctggccaa |
| | cgtgctgcggctggaaacaaagaaaacccctgacgagcggaagaaggccattcacaagctgatgg |
| | aaatcgtgcagagctacgacagctggaccgccagccagaaagaagtgtgggagaaagagctgaat |
| | ctcctgaccaacatggccgccttcaatgacgagatctggaaagaaagcctggtggaactgcacca |
| | ccggatcgagccttacgtgggacagatcgtgtccaagtggcggaagggcctgtctgagggcagaa |
| | agaatctggccggcatcagcatgtggaacatcgacgaactggaagataccaggcggctgctgatt |
| | tcctggtccaagagaagcagaaccccaggcgaggccaacaggatcgaaaccgatgagcctttcgg |
| | cagcagcctgctccagcacattcagaacgtgaaggacgacagactgaagcagatggccaacctga |
| | tcatcatgacagccctgggctttaagtacgacaaagaggaaaaggaccggtacaagcggtggaaa |
| | gagacataccccgcctgccagatcatcctgttcgagaacctgaaccgctacctgttcaacctcga |
| | ccggtccagacgcgagaacagcagactgatgaagtgggcccatcggagcatccccagaaccgtgt |
| | ctatgcagggcgagatgttcggcctgcaagtgggcgacgttcggagcgagtacagctccagattc |
| | cacgccaaaacaggcgcccctggcatcagatgtcacgccctgactgaagaggatctgaaggccgg |
| | cagcaacaccctgaagagactgatcgaggacggcttcatcaatgagagcgagctggcctacctga |
| | agaagggcgatatcatccctagccaaggcggcgaactgttcgtgacactgtccaagcggtacaag |
| | aaggacagcgacaacaacgagctgaccgtgatccacgccgacatcaacgccgctcagaatctgca |
| | gaagcggttttggcagcaaaacagcgaggtgtacagagtgccctgtcagctggccagaatgggcg |
| | aagataagctgtacatccccaagagccagaccgagacaatcaagaagtatttcggcaagggctcc |
| | ttcgtgaagaacaataccgaacaagaggtctacaagtgggagaagtccgagaaaatgaagatcaa |
| | gacggacaccaccttcgacctgcaagacctggatggcttcgaggacatcagcaagaccattgagc |
| | tggcacaagagcagcaaaagaaatacctgaccatgttcagggaccccagcggctactttttcaac |
| | aatgagacatggcggcctcaaaaagaatactggtccatcgtgaacaacatcatcaagagctgcct |
| | caagaagaagatcctgagcaacaaggtcgagctgaaaaggccggcggccacgaaaaaggccggcc |
| | aggcaaaaaagaaaaagggatcctacccatacgatgttccagattacgcttatccctacgacgtg |
| | cctgattatgcatacccatatgatgtccccgactatgcctaagaattcctagagctcgctgatca |
| | gcctcgactgtgccttctagttgccagccatctgttgtttgcccctcccccgtgccttccttgac |
| | cctggaaggtgccactcccactgtcctttcctaataaaatgaggaaattgcatcgcattgtctga |
| | gtaggtgtcattctattctggggggtggggtggggcaggacagcaagggggaggattgggaagag |
| | aatagcaggcatgctggggacggccaaaaaaagagaccatatatggtctccgtgccaagcacctg |
| | ttttcaggtgctcctgtggtgggtaatttttaattacttatggcacacgcacagattcattgacc |
| | ctataggtccggtgtttcgtcctttccacaagatatataaagccaagaaatcgaaatactttcaa |
| | gttacggtaagcatatgatagtccattttaaaacataattttaaaactgcaaactacccaagaaa |
| | ttattactttctacgtcacgtattttgtactaatatctttgtgtttacagtcaaattaattccaa |
| | ttatctctctaacagccttgtatcgtatatgcaaatatgaaggaatcatgggaaataggccctcg |
| | cggccgcaggaacccctagtgatggagttggccactccctctctgcgcgctcgctcgctcactga |
| | ggccgggcgaccaaaggtcgcccgacgcccgggctttgcccgggcggcctcagtgagcgagcgag |
| | cgcgcagctgcctgcaggggcgcctgatgcggtattttctccttacgcatctgtgcggtatttca |
| | caccgcatacgtcaaagcaaccatagtacgcgccctgtagcggcgcattaagcgcggcgggtgtg |
| | gtggttacgcgcagcgtgaccgctacacttgccagcgccctagcgcccgctcctttcgctttctt |
| | cccttcctttctcgccacgttcgccggctttccccgtcaagctctaaatcgggggctccdttagg |
| | gttccgatttagtgctttacggcacctcgaccccaaaaaacttgatttgggtgatggttcacgta |
| | gtgggccatcgccctgatagacggtttttcgccctttgacgttggagtccacgttctttaatagt |
| | ggactcttgttccaaactggaacaacactcaaccctatctcgggctattcttttgatttataagg |
| | gattttgccgatttcggcctattggttaaaaaatgagctgatttaacaaaaatttaacgcgaatt |
| | ttaacaaaatattaacgtttacaattttatggtgcactctcagtacaatctgctctgatgccgca |
| | tagttaagccagccccgacacccgccaacacccgctgacgcgccctgacgggcttgtctgctccc |
| | ggcatccgcttacagacaagctgtgaccgtctccgggagctgcatgtgtcagaggttttcaccgt |
| | catcaccgaaacgcgcgagacgaaagggcctcgtgatacgcctatttttataggttaatgtcatg |
| | ataataatggtttcttagacgtcaggtggcacttttcggggaaatgtgcgcggaacccctatttg |
| | tttatttttctaaatacattcaaatatgtatccgctcatgagacaataaccctgataaatgcttc |
| | aataatattgaaaaaggaagagtatgagtattcaacatttccgtgtcgcccttattccctttttt |
| | gcggcattttgccttcctgtttttgctcacccagaaacgctggtgaaagtaaaagatgctgaaga |
| | tcagttgggtgcacgagtgggttacatcgaactggatctcaacagcggtaagatccttgagagtt |
| | ttcgccccgaagaacgttttccaatgatgagcacttttaaagttctgctatgtggcgcggtatta |
| | tcccgtattgacgccgggcaagagcaactcggtcgccgcatacactattctcagaatgacttggt |
| | tgagtactcaccagtcacagaaaagcatcttacggatggcatgacagtaagagaattatgcagtg |
| | ctgccataaccatgagtgataacactgcggccaacttacttctgacaacgatcggaggaccgaag |
| | gagctaaccgcttttttgcacaacatgggggatcatgtaactcgccttgatcgttgggaaccgga |
| | gctgaatgaagccataccaaacgacgagcgtgacaccacgatgcctgtagcaatggcaacaacgt |
| | tgcgcaaactattaactggcgaactacttactctagcttcccggcaacaattaatagactggatg |
| | gaggcggataaagttgcaggaccacttctgcgctcggcccttccggctggctggtttattgctga |
| | taaatctggagccggtgagcgtggaagccgcggtatcattgcagcactggggccagatggtaagc |
| | cctcccgtatcgtagttatctacacgacggggagtcaggcaactatggatgaacgaaatagacag |
| | atcgctgagataggtgcctcactgattaagcattggtaactgtcagaccaagtttactcatatat |
| | actttagattgatttaaaacttcatttttaatttaaaaggatctaggtgaagatcctttttgata |
| | atctcatgaccaaaatcccttaacgtgagttttcgttccactgagcgtcagaccccgtagaaaag |
| | atcaaaggatcttcttgagatcctttttttctgcgcgtaatctgctgcttgcaaacaaaaaaacc |
| | accgctaccagcggtggtttgtttgccggatcaagagctaccaactctttttccgaaggtaactg |
| | gcttcagcagagcgcagataccaaatactgtccttctagtgtagccgtagttaggccaccacttc |
| | aagaactctgtagcaccgcctacatacctcgctctgctaatcctgttaccagtggctgctgccag |
| | tggcgataagtcgtgtcttaccgggttggactcaagacgatagttaccggataaggcgcagcggt |
| | cgggctgaacggggggttcgtgcacacagcccagcttggagcgaacgacctacaccgaactgaga |
| | tacctacagcgtgagctatgagaaagcgccacgcttcccgaagggagaaaggcggacaggtatcc |
| | ggtaagcggcagggtcggaacaggagagcgcacgagggagcttccagggggaaacgcctggtatc |
| | tttatagtcctgtcgggtttcgccacctctgacttgagcgtcgatttttgtgatgctcgtcaggg |
| | gggcggagcctatggaaaaacgccagcaacgcggcctttttacggttcctggccttttgctggcc |
| | ttttgctcacatgt |

[1720] Various modifications and variations of the described methods, pharmaceutical compositions, and kits of the invention will be apparent to those skilled in the art without departing from the scope and spirit of the invention. Although the invention has been described in connection with specific embodiments, it will be understood that it is capable of further modifications and that the invention as claimed should not be unduly limited to such specific embodiments. Indeed, various modifications of the described modes for carrying out the invention that are obvious to those skilled in the art are intended to be within the scope of the invention. This application is intended to cover any variations, uses, or adaptations of the invention following, in general, the principles of the invention and including such departures from the present disclosure come within known customary practice within the art to which the invention pertains and may be applied to the essential features herein before set forth.

What is claimed is:

1. A non-naturally occurring or engineered system comprising
i) a Cas12b effector protein from Table 1 or 2, and
ii) a guide comprising a guide sequence capable of hybridizing to a target sequence.

2. The system of claim 1, wherein the Cas12b effector protein originates from a bacterium selected from the group consisting of: Alicyclobacillus kakegawensis, Bacillus sp. V3-13, Bacillus hisashii, Lentisphaeria bacterium, and Laceyella sediminis.

3. The system of claim 1, wherein the tracr RNA is fused to the crRNA at the 5′ end of the direct repeat sequence.

4. The system of claim 1, which comprises two or more guide sequences capable of hybridizing two different target sequences or different regions of the same target sequence.

5. The system of claim 1, wherein the guide sequence hybridizes to one or more target sequences in a prokaryotic cell.

6. The system of claim 1, wherein the guide sequence hybridizes to one or more target sequences in a eukaryotic cell.

7. The system of claim 1, wherein the Cas12b effector protein comprises one or more nuclear localization signals (NLSs).

8. The system of claim 1, wherein the Cas12b effector protein is catalytically inactive.

9. The system of claim 1, wherein the Cas12b effector protein is associated with one or more functional domains.

10. The system of claim 9, wherein the one or more functional domains cleaves the one or more target DNA sequences.

11. The system of claim 10, wherein the functional domain modifies transcription or translation of the one or more target sequences.

12. The system of claim 1, wherein the Cas12b effector protein is associated with one or more functional domains; and the Cas12b effector protein contains one or more mutations within a RuvC and/or Nuc domain, whereby the formed CRISPR complex is capable of delivering an epigenetic modifier or a transcriptional or translational activation or repression signal at or adjacent to a target sequence.

13. The system of claim 1, wherein the Cas12b effector protein is associated with an adenosine deaminase or cytidine deaminase.

14. The system of claim 1, further comprising a recombination template.

15. The system of claim 14, wherein the recombination template is inserted by homology-directed repair (HDR).

16. The system of claim 1, further comprising a tracr RNA.

17. A Cas12b vector system, which comprises one or more vectors comprising:
a first regulatory element operably linked to a nucleotide sequence encoding a Cas12b effector protein from Table 1 or 2, and
i) a) a second regulatory element operably linked to a nucleotide sequence encoding guide sequence, and
b) a third regulatory element operably linked to a nucleotide sequence encoding the tracr RNA; or
ii) a second regulatory element operably linked to a nucleotide sequence encoding the guide sequence and the tracr RNA.

18. The vector system of claim 17, wherein the nucleotide sequence encoding the Cas12b effector protein is codon optimized for expression in a eukaryotic cell.

19. The vector system of claim 17 or 18, which is comprised in a single vector.

20. The vector system of any of claims 17 to 19, wherein the one or more vectors comprise viral vectors.

21. The vector system of any of claims 17 to 20, wherein the one or more vectors comprise one or more retroviral, lentiviral, adenoviral, adeno-associated or herpes simplex viral vectors.

22. A delivery system configured to deliver a Cas12b effector protein and one or more nucleic acid components of a non-naturally occurring or engineered composition, comprising
i) the Cas12b effector protein selected from Table 1 or 2,
ii) a guide sequence that is capable of hybridizing to one or more target sequences, and
iii) a tracr RNA.

23. The delivery system of claim 22, which comprises one or more vectors, or one or more polynucleotide molecules, the one or more vectors or polynucleotide molecules comprising one or more polynucleotide molecules encoding the Cas12b effector protein and one or more nucleic acid components of the non-naturally occurring or engineered composition.

24. The delivery system of claim 22 or 23, which comprises a delivery vehicle comprising liposome(s), particle(s), exosome(s), microvesicle(s), a gene-gun, or viral vector(s).

25. The non-naturally occurring or engineered system of claim 1 to 16, vector system of claim 17 to 21, or delivery system of claim 22 to 24, for use in a therapeutic method of treatment.

26. A method of modifying one or more target sequences of interest, the method comprising contacting the one or more target sequences with one or more non-naturally occurring or engineered compositions comprising
i) a Cas12b effector protein from Table 1 or 2,
ii) a guide sequence that is capable of hybridizing to the one or more target sequences, and
iii) a tracr RNA,
whereby there is formed a CRISPR complex comprising the Cas12b effector protein complexed with the crRNA and the tracr RNA,
wherein the guide sequence directs sequence-specific binding to the one or more target sequences in a cell, whereby expression of the one or more target sequences is modified.

27. The method of claim 26, wherein modifying the one or more target sequences comprises cleaving the one or more target sequences.

28. The method of claim 26 or 27, wherein modifying of the one or more target sequences comprises increasing or decreasing expression of the one or more target sequences.

29. The method of claim 28, wherein the composition further comprises a recombination template, and wherein modifying the one or more target sequences comprises insertion of the recombination template or a portion thereof.

30. The method of any of claims 26 to 29, wherein the one or more target sequences is in a prokaryotic cell.

31. The method of any of claims 26 to 30, wherein the one or more target sequences is in a eukaryotic cell.

32. A cell or progeny thereof comprising one or more modified target sequences, wherein the one or more target sequences has been modified according to the method of any of claims 23 to 29, optionally a therapeutic T cell or antibody-producing B-cell or wherein said cell is a plant cell.

33. The cell of claim 32, wherein the cell is a prokaryotic cell.

34. The cell of claim 32, wherein the cell is a eukaryotic cell.

35. The cell according to any of claims 32 to 34, wherein the modification of the one or more target sequences results in:
the cell comprising altered expression of at least one gene product;
the cell comprising altered expression of at least one gene product, wherein the expression of the at least one gene product is increased;
the cell comprising altered expression of at least one gene product, wherein the expression of the at least one gene product is decreased; or
a cell or population that produces and/or secretes an endogenous or non-endogenous biological product or chemical compound.

36. The eukaryotic cell according to any one of claim 32 or 35, wherein the cell is a mammalian cell or a human cell.

37. A cell line of or comprising the cell according to any one of claims 32 to 36, or progeny thereof.

38. A multicellular organism comprising one or more cells according to any one of claims 32 to 36.

39. A plant or animal model comprising one or more cells according to any one of claims 32 to 36.

40. A gene product from a cell of any one of claims 32 to 36 or the cell line of claim 37 or the organism of claim 38 or the plant or animal model of claim 39.

41. The gene product of claim 40, wherein the amount of gene product expressed is greater than or less than the amount of gene product from a cell that does not have altered expression.

42. An isolated Cas12b effector protein from Table 1 or 2.

43. An isolated nucleic acid encoding the Cas12b effector protein of claim 42.

44. The isolated nucleic acid according to claim 43, which is a DNA and further comprises a sequence encoding a crRNA and a tracr RNA.

45. An isolated eukaryotic cell comprising the nucleic acid according to claim 43 or 44 or the Cas12b of claim 42.

46. A non-naturally occurring or engineered system comprising
i) an mRNA encoding a Cas12b effector protein from Table 1 or 2,
ii) a guide sequence, and
iii) a tracr RNA.

47. The non-naturally occurring or engineered system according to claim 46, wherein the tracr RNA is fused to the crRNA at the 5′ end of a direct repeat.

48. An engineered composition for site directed base editing comprising a targeting domain and an adenosine deaminase, cytidine deaminase, or catalytic domain thereof, wherein the targeting domain comprise a Cas12b effector protein, or fragment thereof which retains oligonucleotide-binding activity and a guide molecule.

49. The composition of claim 48, wherein the Cas12b effector protein is catalytically inactive.

50. The composition of claim 48, wherein the Cas12b effector protein is selected from Table 1 or 2.

51. The composition of claim 50, protein wherein the Cas12b effector protein originates from a bacterium selected from the group consisting of: Alicyclobacillus kakegawensis, Bacillus sp. V3-13, Bacillus hisashii, Lentisphaeria bacterium, and Laceyella sediminis.

52. A method of modifying an adenosine or cytidine in one or more target oligonucleotide of interest, comprising delivering to said one or more target oligonucleotide, the composition according to any one of claims 48 to 51.

53. The method of claim 52, wherein the for use in the treatment or prevention of a disease caused by transcripts containing a pathogenic T-C or A-G point mutation.

54. An isolated cell obtained from the method of any one of claim 48 or 49 and/or comprising the composition of any one of claims 48 to 51.

55. The cell or progeny thereof of claim 54, wherein said eukaryotic cell, preferably a human or non-human animal cell, optionally a therapeutic T cell or antibody-producing B-cell or wherein said cell is a plant cell.

56. A non-human animal comprising said modified cell or progeny thereof of claim 50 or 51.

57. A plant comprising said modified cell of claim 56.

58. A modified cell according to claim 56 or 57 for use in therapy, preferably cell therapy.

59. A method of modifying an adenine or cytosine in a target oligonucleotide, comprising delivering to said target oligonucleotide:
(a) a catalytically inactive Cas12b protein;
(b) a guide molecule which comprises a guide sequence linked to a direct repeat; and
(c) an adenosine or cytidine deaminase protein or catalytic domain thereof,
wherein said adenosine or cytidine deaminase protein or catalytic domain thereof is covalently or non-covalently linked to said catalytically inactive Cas12b protein or said guide molecule is adapted to or linked thereto after delivery;
wherein said guide molecule forms a complex with said catalytically inactive Cas12b and directs said complex to bind said target oligonucleotide, wherein said guide sequence is capable of hybridizing with a target sequence within said target oligonucleotide to form an oligonucleotide duplex.

60. The method of claim 59, wherein: (A) said Cytosine is outside said target sequence that forms said oligonucleotide duplex, wherein said cytidine deaminase protein or catalytic domain thereof deaminates said Cytosine outside said oligonucleotide duplex, or (B) said Cytosine is within said target sequence that forms said oligonucleotide duplex, wherein said guide sequence comprises a non-pairing Adenine or Uracil at a position corresponding to said Cytosine resulting in a C-A or C-U mismatch in said oligonucleotide duplex, and wherein the cytidine deaminase protein or catalytic domain thereof deaminates the Cytosine in the oligonucleotide duplex opposite to the non-pairing Adenine or Uracil.

61. The method of claim 59, wherein said adenosine deaminase protein or catalytic domain thereof deaminates said Adenine or Cytosine in the oligonucleotide duplex.

62. The method of claim 59, wherein the Cas12b protein is selected from Table 1 or 2.

63. The method of claim 62, wherein the Cas12b protein originates from a bacterium selected from the group consisting of: Alicyclobacillus kakegawensis, Bacillus sp. V3-13, Bacillus hisashii, Lentisphaeria bacterium, and Laceyella sediminis.

64. A system for detecting the presence of one or more target sequences in one or more in vitro samples, comprising:
a Cas12b protein;
at least one guide polynucleotide comprising a guide sequence designed to have a degree of complementarity with the one or more target sequences, and designed to form a complex with the Cas12b protein; and
an oligonucleotide-based masking construct comprising a non-target sequence,
wherein the Cas12b protein exhibits collateral nuclease activity and cleaves the non-target sequence of the oligo-nucleotide based masking construct once activated by the one or more target sequences.

65. A system for detecting the presence of target polypeptides in one or more in vitro samples comprising:
a Cas12b protein;
one or more detection aptamers, each designed to bind to one of the one or more target polypeptides, each detection aptamer comprising a masked promoter binding site or masked primer binding site and a trigger sequence template; and
an oligonucleotide-based masking construct comprising a non-target sequence.

66. The system of claim 64 or 65, further comprising nucleic acid amplification reagents to amplify the target sequence or the trigger sequence.

67. The system of claim 66, wherein the nucleic acid amplification reagents are isothermal amplification reagents.

68. The system of any one of claims 65 to 67, wherein the Cas12b protein is selected from Table 1 or 2.

69. The system of claim 68, wherein the Cas12b protein originates from a bacterium selected from the group consisting of: Alicyclobacillus kakegawensis, Bacillus sp. V3-13, Bacillus hisashii, Lentisphaeria bacterium, and Laceyella sediminis.

70. A method for detecting one or more target sequences in one or more in vitro samples, comprising:
contacting one or more samples with:
i) a Cas12b effector protein
ii) at least one guide polynucleotide comprising a guide sequence designed to have a degree of complementarity with the one or more target sequences, and designed to form a complex with the Cas12b effector protein; and
iii) an oligonucleotide-based masking construct comprising a non-target sequence; and
wherein said Cas12 effector protein exhibits collateral nuclease activity and cleaves the non-target sequence of the oligonucleotide-based masking construct.

71. The method of claim 70, wherein the Cas12b effector protein is selected from Table 1 or 2.

72. The method of claim 71, wherein the Cas12b effector protein originates from a bacterium selected from the group consisting of: Alicyclobacillus kakegawensis, Bacillus sp. V3-13, Bacillus hisashii, Lentisphaeria bacterium, and Laceyella sediminis.

73. A non-naturally occurring or engineered composition comprising a Cas12b protein linked to an inactive first portion of an enzyme or reporter moiety, wherein the enzyme or reporter moiety is reconstituted when contacted with a complementary portion of the enzyme or reporter moiety.

74. The composition of claim 73, wherein the enzyme or reporter moiety comprises a proteolytic enzyme.

75. The composition of claim 73 or 74, wherein the Cas12b protein comprises a first Cas12b protein and a second Cas12b protein linked to the complementary portion of the enzyme or reporter moiety.

76. The composition of claim 73, further comprising
i) a first guide capable of forming a complex with the first Cas12b protein and hybridizing to a first target sequence of a target nucleic acid; and
ii) a second guide capable of forming a complex with the second Cas12b protein, and hybridizing to a second target sequence of the target nucleic acid.

77. The composition of any one of claims 73-76, wherein the enzyme comprises a caspase.

78. The composition of any one of claims 73-77, wherein the enzyme comprises tobacco etch virus (TEV).

79. A method of providing a proteolytic activity in a cell containing a target oligonucleotide, comprising
a) contacting a cell or population of cells with:
i) a first Cas12b effector protein linked to an inactive portion of a proteolytic enzyme;
ii) a second Cas12b effector protein linked to a complementary portion of the proteolytic enzyme, wherein proteolytic activity of the proteolytic enzyme is reconstituted when the first portion and the complementary portion of the proteolytic enzyme are contacted;
iii) a first guide that binds to the first Cas12b effector protein and hybridizes to a first target sequence of the target oligonucleotide; and
iv) a second guide that binds to the second Cas12b effector protein and hybridizes to a second target sequence of the target oligonucleotide,
whereby the first portion and the complementary portion of the proteolytic enzyme are contacted and the proteolytic activity of the proteolytic enzyme is reconstituted.

80. The method of claim 79, wherein the enzyme is a caspase.

81. The method of claim 80, wherein the proteolytic enzyme is TEV protease, wherein the proteolytic activity of the TEV protease is reconstituted, whereby a TEV substrate is cleaved and activated.

82. The method of claim 81, wherein the TEV substrate is a procaspase engineered to contain TEV target sequences whereby cleavage by the TEV protease activates the procaspase.

83. A method of identifying a cell containing an oligonucleotide of interest, the method comprising contacting the oligonucleotide in the cell with a composition which comprises:
i) a first Cas12b effector protein linked to an inactive first portion of a proteolytic enzyme;
ii) a second Cas12b effector protein linked to a complementary portion of the proteolytic enzyme wherein activity of the proteolytic enzyme is reconstituted when the first portion and the complementary portion of the proteolytic enzyme are contacted;
iii) a first guide that binds to the first Cas12b effector protein and hybridizes to a first target sequence of the oligonucleotide;
iv) a second guide that binds to the second Cas12b effector protein and hybridizes to a second target sequence of the oligonucleotide; and
v) a reporter which is detectably cleaved,
wherein the first portion and the complementary portion of the proteolytic enzyme are contacted when the oligonucleotide of interest is present in the cell, whereby the activity of the proteolytic enzyme is reconstituted and detectably cleaves the reporter.

84. A method of identifying a cell containing an oligonucleotide of interest, the method comprising contacting the oligonucleotide in the cell with a composition which comprises:
i) a first Cas12b effector protein linked to an inactive first portion of a reporter;
ii) a second Cas12b effector protein linked to a complementary portion of the reporter wherein activity of the reporter is reconstituted when the first portion and the complementary portion of the reporter are contacted;
iii) a first guide that binds to the first Cas12b effector protein and hybridizes to a first target sequence of the oligonucleotide;
iv) a second guide that binds to the second Cas12b effector protein and hybridizes to a second target sequence of the oligonucleotide; and
v) the reporter,
wherein the first portion and a complementary portion of the reporter are contacted when the oligonucleotide of interest is present in the cell, whereby the activity of the reporter is reconstituted.

85. The method of claim 83 or 84, wherein the reporter is a fluorescent protein or a luminescent protein.

The application's sequence listing, which the Patent Office published only in electronic form, follows.

SEQUENCE LISTING (663 sequences)

SEQ ID NO: 1 - RNA, 188 nt, Artificial Sequence
  Synthetic Oligonucleotide
cgccuaucagccaacaugcucgcuuugcgaaggcugacggcccgcucucauuuggcauugccgggagccggaguuuucggaagagagugucgacgacugcugaucuccgcauccgcguccuguucgccaggccgggucggguguacggaucaugcuggcagcagucuacgccgagaacauucgcuuuu

SEQ ID NO: 2 - RNA, 60 nt, Artificial Sequence
  Synthetic Oligonucleotide
cggaagagagugucgacgacugcugaucuccgcauccgcguccuguucgccaggccgggu

SEQ ID NO: 3 - RNA, 62 nt, Artificial Sequence
  Synthetic Oligonucleotide
ccaacaugcucgcuuugcgaaggcugacggcccgcucucauuuggcauugccgggagccgga

SEQ ID NO: 4 - RNA, 118 nt, Artificial Sequence
  Synthetic Oligonucleotide
ucgcuuugcgaaggcugacggcccgcucucauuuggcauugccgggagccggaguuuucggaagagagugucgacgacugcugaucuccgcauccgcguccuguucgccaggccgggu

SEQ ID NO: 5 - RNA, 87 nt, Artificial Sequence
  Synthetic Oligonucleotide
augcucgcuuugcgaaggcugacggcccgcucucauuuggcauugccgggagccggaguuuucggaagagagugucgacgacugcug

SEQ ID NO: 6 - RNA, 71 nt, Artificial Sequence
  Synthetic Oligonucleotide
aguuuucggaagagagugucgacgacugcugaucuccgcauccgcguccuguucgccaggccgggucgggu

SEQ ID NO: 7 - RNA, 61 nt, Artificial Sequence
  Synthetic Oligonucleotide
cgccuaucagccaacaugcucgcuuugcgaaggcugacggcccgcucucauuuggcauugc

SEQ ID NO: 8 - RNA, 87 nt, Artificial Sequence
  Synthetic Oligonucleotide
cgccuaucagccaacaugcucgcuuugcgaaggcugacggcccgcucucauuuggcauugccgggagccggaguuuucggaagagag

SEQ ID NO: 9 - RNA, 84 nt, Artificial Sequence
  Synthetic Oligonucleotide
ugaucuccgcauccgcguccuguucgccaggccgggucggguguacggaucaugcuggcagcagucuacgccgagaacauucgc

SEQ ID NO: 10 - RNA, 91 nt, Artificial Sequence
  Synthetic Oligonucleotide
auugccgggagccggaguuuucggaagagagugucgacgacugcugaucuccgcauccgcguccuguucgccaggccgggucggguguacg

SEQ ID NO: 11 - DNA, 83 bp, Artificial Sequence
  Synthetic Oligonucleotide
tccgcatccgcgtcctgttcgccaggccgggtcgggtgtacggatcatgctggcagcagtctacgccgagaacattcgctttt

SEQ ID NO: 12 - RNA, 60 nt, Artificial Sequence; identical to SEQ ID NO: 2
  Synthetic Oligonucleotide

SEQ ID NO: 13 - RNA, 85 nt, Artificial Sequence
  Synthetic Oligonucleotide
aguuuucggaagagagugucgacgacugcugaucuccgcauccgcguccuguucgccaggccgggucggguccgcgaauggacac

SEQ ID NO: 14 - DNA, 129 bp, Artificial Sequence
  Synthetic Oligonucleotide
tagggaatattatataatggacttacgaggttctgtcttttggtcaggacaaccgtctagctataagtgctgcagggtgtgagaaactcctattgctggacgatgtctcttgatacgaggcattagcac

SEQ ID NO: 15 - DNA, 75 bp, Artificial Sequence
  Synthetic Oligonucleotide
gacgtctagctataagtgctgcagggtgtgagaaactcctattgctggacgatgtctcttacgaggcattagcac

SEQ ID NO: 16 - DNA, 106 bp, Artificial Sequence
  Synthetic Oligonucleotide
acgaggttctgtcttttggtcaggacaaccgtctagctataagtgctgcagggtgtgagaaactcctattgctggacgatgtctctatgatacgaggcattagcac

SEQ ID NO: 17 - DNA, 133 bp, Artificial Sequence
  Synthetic Oligonucleotide
acgaggttctgtcttttggtcaggacaaccgtctagctataagtgctgcagggtgtgagaaactcctattgctggacgatgtctcttttatttcttttttgtagaaaaaagaaatgatacgaggcattagcac

SEQ ID NO: 18 - DNA, 97 bp, Artificial Sequence
  Synthetic Oligonucleotide
gttctgtcttttggtcaggacaaccgtctagctataagtgctgcagggtgtgagaaactcctattgctggacgatatctcttacgaggcattagcac

SEQ ID NO: 19 - DNA, 84 bp, Artificial Sequence
  Synthetic Oligonucleotide
gtcaggacaaccgtctagctataagtgctgcagggtgtgagaaactcctattgctggacgatgtctcttacgaggcattagcac

SEQ ID NO: 20 - DNA, 108 bp, Artificial Sequence
  Synthetic Oligonucleotide
ggacttacgaggttctgtcttttggtcaggacaaccgtctagctataagtgctgcagggtgtgagaaactcctattgctggacgatgtctcttacgaggcattagcac

SEQ ID NO: 21 - DNA, 102 bp, Artificial Sequence
  Synthetic Oligonucleotide
acgaggttctgtcttttggtcaggacaaccgtctagctataagtgctgcagggtgtgagaaactcctattgctggacgatgtctcttacgaggcattagcac

SEQ ID NO: 22 - DNA, 129 bp, Artificial Sequence
  Synthetic Oligonucleotide
tagggaatattatataatggacttacgaggttctgtcttttggtcaggacaaccgtctagctataagtgctgcagggtgtgagaaactcctattgctggacgatgtctctttatacgaggcattagcac

SEQ ID NO: 23 - DNA, 121 bp, Artificial Sequence
  Synthetic Oligonucleotide
attatatattggacttacgaggttctgtcttttggtcaggacaaccgtctagctataagtgctgcagggtgtgagaaactcctattgctggacgatgtctctttatacgaggcattagcac

SEQ ID NO: 24 - DNA, 113 bp, Artificial Sequence
  Synthetic Oligonucleotide
atggacttacgaggttctgtcttttggtcaggacaaccgtctagctataagtgctgcagggtgtgagaaactcctattgctggacgatgtctctttatacgaggcattagcac

SEQ ID NO: 25 - DNA, 105 bp, Artificial Sequence
  Synthetic Oligonucleotide
acgaggttctgtcttttggtcaggacaaccgtctagctataagtgctgcagggtgtgagaaactcctattgctggacgatgtctctttatacgaggcattagcac

SEQ ID NO: 26 - DNA, 160 bp, Artificial Sequence
  Synthetic Oligonucleotide
tagggaatattatataatggacttacgaggttctgtcttttggtcaggacaaccgtctagctataagtgctgcagggtgtgagaaactcctattgctggacgatgtctcatttatttcttaattgtccaagaattaagaaatgatacgaggcattagcac

SEQ ID NO: 27 - DNA, 152 bp, Artificial Sequence
  Synthetic Oligonucleotide
attatataatggacttacgaggttctgtcttttggtcaggacaaccgtctagctataagtgctgcagggtgtgagaaactcctattgctggacgatgtctcatttatttcttaattgtccaagaattaagaaatgatacgaggcattagcac

SEQ ID NO: 28 - DNA, 144 bp, Artificial Sequence
  Synthetic Oligonucleotide
atggacttacgaggttctgtcttttggtcaggacaaccgtctagctataagtgctgcagggtgtgagaaactcctattgctggacgatgtctcatttatttcttaattgtccaagaattaagaaatgatacgaggcattagcac

SEQ ID NO: 29 - DNA, 136 bp, Artificial Sequence
  Synthetic Oligonucleotide
acgaggttctgtcttttggtcaggacaaccgtctagctataagtgctgcagggtgtgagaaactcctattgctggacgatgtctcatttatttcttaattgtccaagaattaagaaatgatacgaggcattagcac

SEQ ID NO: 30 - DNA, 80 bp, Artificial Sequence
  Synthetic Oligonucleotide
tttgcctaaagggcaaagaatactgtgcgtgtgctaaggatggaaaaaatccattcaaccacaggattacattatttatc

SEQ ID NO: 31 - DNA, 89 bp, Artificial Sequence
  Synthetic Oligonucleotide
gtcgtctataggacggcgaggacaacgggaactgccaatgtgctctttccaagagcaaacaccccgttggcttcaagatgaccgctcgc

SEQ ID NO: 32 - DNA, 78 bp, Artificial Sequence
  Synthetic Oligonucleotide
gacctatagggtcaatgaatctgtgcgtgtgccataagtaattaaaaattacccaccacaggattatcttatttctgc

SEQ ID NO: 33 - RNA, 97 nt, Artificial Sequence
  Synthetic Oligonucleotide
uggcaacucgcccgcuaguacaacuucgguugccccacaagugaggaccuuucucacguaaccguguagggcaacuuagacggcaggauaucuagcc

SEQ ID NO: 34 - RNA, 97 nt, Artificial Sequence
  Synthetic Oligonucleotide
uggcaacucgcccgcuaguacaacuucgguugccccacaagugaggaccuuucucacguaaccguguagggcaacuuagacgccaggauaucuagcc

SEQ ID NO: 35 - RNA, 138 nt, Artificial Sequence
  Synthetic Oligonucleotide
gccgaucuauaggacggcagauucaacgggaugugccaaugcacucuuuccaggagugaacaccccguuggcuucaacaugaucgcccgcucaacggucccuagucggaucguugagcgggcgaucugagaagggcac

SEQ ID NO: 36 - RNA, 128 nt, Artificial Sequence
  Synthetic Oligonucleotide
cacggugaagagucuagcgggcgaguugcaucgcaacucgcccgcuaguacaacuucgguugccccacaagugaggaccuuucucacguaaccguguagggcaacuuagaccgcaggauaucuagccg

SEQ ID NO: 37 - RNA, 112 nt, Artificial Sequence
  Synthetic Oligonucleotide
cacggugaagagucuagcgggauccccgcuaguacaacuucgguugccccacaagugaggaccuuucucacguaaccguguagggcaacuuagacggcaggauaucuagccg

SEQ ID NO: 38 - RNA, 89 nt, Artificial Sequence
  Synthetic Oligonucleotide
acgagguucugucuuuuggucaggacaaccgucuagcuauaagugcugcagggugugagaaacuccuauugcuggacgaugucucuuuu

SEQ ID NO: 39 - RNA, 98 nt, Artificial Sequence
  Synthetic Oligonucleotide
gagguucugucuuuggucaggacaaccgucuagcuauaagugcugcagggugugagaaacuccuauugcuggacgaugucucuacgaggcauuagcac

SEQ ID NO: 40 - RNA, 106 nt, Artificial Sequence
  Synthetic Oligonucleotide
acgagguucugucuuuuggucaggacaaccgucuagcuauaagugcugcagggugugagaaacuccuauugcuggacgaugucucuaugauacgaggcauuagcac

SEQ ID NO: 41 - RNA, 102 nt, Artificial Sequence
  Synthetic Oligonucleotide
acgagguucugucuuuuggucaggacaaccgucuagcuauaagugcugcagggugugagaaacuccuauugcuggacgaugucucuuacgaggcauuagcac

SEQ ID NO: 42 - DNA, 104 bp, Artificial Sequence
  Synthetic Oligonucleotide
gacctatagggtcaatgaatctgtgcgtgtgccataagtaattaaaaattacccaccacaggattatcttatttctgcaaaagcagaaataagatgattggcac

SEQ ID NO: 43 - DNA, 107 bp, Artificial Sequence
  Synthetic Oligonucleotide
ggtgacctatagggtcaatgaatctgtgcgtgtgccataagtaattaaaaattacccaccacaggattatcttatttctgcaaaagcagaaataagatgattggcac

SEQ ID NO: 44 - DNA, 101 bp, Artificial Sequence
  Synthetic Oligonucleotide
ctatagggtcaatgaatctgtgcgtgtgccataagtaattaaaaattacccaccacaggattatcttatttctgcaaaagcagaaataagatgattggcac

SEQ ID NO: 45 - DNA, 88 bp, Artificial Sequence
  Synthetic Oligonucleotide
gacctatagggtcaatgaatctgtgcgtgtgccataagtaattaaaaattacccaccacaggatcatcttaaaaaagatgattggcac

SEQ ID NO: 46 - DNA, 98 bp, Artificial Sequence
  Synthetic Oligonucleotide
gacctatagggtcaatgaatctgtgcgtgtgccataagtaattaaaaattacccaccacaggatcatcttatttcaaaagaaataagatgattggcac

SEQ ID NO: 47 - DNA, 88 bp, Artificial Sequence
  Synthetic Oligonucleotide
gacctatagggtcaatgaatctgtgcgtgtgccataagtaattaaaaattacccaccacaggagcacctgaaaacaggtgcttggcac

SEQ ID NO: 48 - DNA, 36 bp, Artificial Sequence
  Synthetic Oligonucleotide
gccgtttccctcactcctgctcggtgaatttggctc

SEQ ID NO: 49 - DNA, 36 bp, Artificial Sequence
  Synthetic Oligonucleotide
gagccaaattcaccgagcaggagtgagggaaacggc

SEQ ID NO: 50 - DNA, 36 bp, Artificial Sequence
  Synthetic Oligonucleotide
gccgttcccctcactcctgctcggcaaatttagctc

SEQ ID NO: 51 - DNA, 36 bp, Artificial Sequence
  Synthetic Oligonucleotide
gagctaaatttgccgagcaggagtgaggggaacggc

SEQ ID NO: 52 - DNA, 36 bp, Artificial Sequence
  Synthetic Oligonucleotide
gctgtttgggaggtcagaaatagggggtccaggagc

SEQ ID NO: 53 - DNA, 36 bp, Artificial Sequence
  Synthetic Oligonucleotide
gctcctggaccccctatttctgacctcccaaacagc

SEQ ID NO: 54 - DNA, 36 bp, Artificial Sequence
  Synthetic Oligonucleotide
gctgttagggaggtcagaaataggatgtccaagagc

SEQ ID NO: 55 - DNA, 36 bp, Artificial Sequence
  Synthetic Oligonucleotide
gctcttggacatcctatttctgacctccctaacagc

SEQ ID NO: 56 - DNA, 36 bp, Artificial Sequence
  Synthetic Oligonucleotide
ccaaattcttctcccctgggaagcatccctggacac

SEQ ID NO: 57 - DNA, 36 bp, Artificial Sequence
  Synthetic Oligonucleotide
gtgtcgaggtgtgcttcccaggggagaaggatttgg

SEQ ID NO: 58 - DNA, 36 bp, Artificial Sequence
  Synthetic Oligonucleotide
ccaaatccttctcccctgggaagcacacctcgacac

SEQ ID NO: 59 - DNA, 36 bp, Artificial Sequence
  Synthetic Oligonucleotide
ggtttaggaagaggggacccttcgtgtggagctgtg

SEQ ID NO: 60 - DNA, 36 bp, Artificial Sequence; identical to SEQ ID NO: 48
  Synthetic Oligonucleotide

SEQ ID NO: 61 - DNA, 36 bp, Artificial Sequence
  Synthetic Oligonucleotide
gagccaaattcaccgagcaagagtgagggaaacggc

SEQ ID NO: 62 - DNA, 36 bp, Artificial Sequence; identical to SEQ ID NO: 50
  Synthetic Oligonucleotide

SEQ ID NO: 63 - DNA, 36 bp, Artificial Sequence; identical to SEQ ID NO: 51
  Synthetic Oligonucleotide

SEQ ID NO: 64 - DNA, 107 bp, Artificial Sequence
  Synthetic Oligonucleotide
accatctactccatcatcttcttaactggcattgtgggcaatggattggtcatcctggtcatgggttaccagaagaaactgagaagcatgacggacaagtacaggct

SEQ ID NO: 65 - DNA, 107 bp, Artificial Sequence
  Synthetic Oligonucleotide
agcctgtacttgtccgtcatgcttctcagtttcttctggtaacccatgaccaggatgaccaatccattgcccacaatgccagttaagaagatgatggagtagatggt

SEQ ID NO: 66 - protein, 36 aa, Artificial Sequence
  Synthetic Peptide
TIYSIIFLTGIVGNGLVILVMGYQKKLRSMTDKYRL

SEQ ID NO: 67 - DNA, 107 bp, Artificial Sequence
  Synthetic Oligonucleotide
gcacctgtcagtggccgacctcctctttgtcatcacgcttcccttctgggcagttgatgccgtggcaaactggtactttgggaacttcctatgcaaggcagtccatg

SEQ ID NO: 68 - DNA, 107 bp, Artificial Sequence
  Synthetic Oligonucleotide
catggactgccttgcataggaagttcccaaagtaccagtttgccacggcatcaactgcccagaagggaagcgtgatgacaaagaggaggtcggccactgacaggtgc

SEQ ID NO: 69 - protein, 35 aa, Artificial Sequence
  Synthetic Peptide
HLSVADLLFVITLPFWAVDAVANWYFGNFLCKAVH

SEQ ID NO: 70 - DNA, 107 bp, Artificial Sequence
  Synthetic Oligonucleotide
tcatctacacagtcaacctctacagcagtgtcctcatcctggccttcatcagtctggaccgctacctggccatcgtccacgccaccaacagtcagaggccaaggaag

SEQ ID NO: 71 - DNA, 107 bp, Artificial Sequence
  Synthetic Oligonucleotide
cttccttggcctctgactgttggtggcgtggacgatggccaggtagcggtccagactgatgaaggccaggatgaggacactgctgtagaggttgactgtgtagatga

SEQ ID NO: 72 - protein, 36 aa, Artificial Sequence
  Synthetic Peptide
VIYTVNLYSSVLILAFISLDRYLAIVHATNSQRPRK

SEQ ID NO: 73 - DNA, 107 bp, Artificial Sequence
  Synthetic Oligonucleotide
ctgttggctgaaaaggtggtctatgttggcgtctggatccctgccctcctgctgactattcccgacttcatctttgccaacgtcagtgaggcagatgacagatatat

SEQ ID NO: 74 - DNA, 107 bp, Artificial Sequence
  Synthetic Oligonucleotide
atatatctgtcatctgcctcactgacgttggcaaagatgaagtcgggaatagtcagcaggagggcagggatccagacgccaacatagaccaccttttcagccaacag

SEQ ID NO: 75 - protein, 36 aa, Artificial Sequence
  Synthetic Peptide
LLAEKVVYVGVWIPALLLTIPDFIFANVSEADDRYI

SEQ ID NO: 76 - DNA, 23 bp, Artificial Sequence
  Synthetic Oligonucleotide
ccgacttcatctttgccaacgtc

SEQ ID NO: 77 - DNA, 23 bp, Artificial Sequence
  Synthetic Oligonucleotide
tgggcaatggattggtcatcctg

SEQ ID NO: 78 - RNA, 122 nt, Bacillus hisashii
  misc_feature (103)..(122): n is a, c, g, or u
acgagguucugucuuuuggucaggacaaccgucuagcuauaagugcugcagggugugagaaacuccuauugcuggacgaugucucuuacgaggcauuagcacnnnnnnnnnnnnnnnnnnnn

SEQ ID NO: 79 - DNA, 36 bp, Artificial Sequence; identical to SEQ ID NO: 48
  Synthetic Oligonucleotide

SEQ ID NO: 80 - DNA, 36 bp, Artificial Sequence; identical to SEQ ID NO: 49
  Synthetic Oligonucleotide

SEQ ID NO: 81 - DNA, 36 bp, Artificial Sequence; identical to SEQ ID NO: 50
  Synthetic Oligonucleotide

SEQ ID NO: 82 - DNA, 36 bp, Artificial Sequence; identical to SEQ ID NO: 50
  Synthetic Oligonucleotide

SEQ ID NO: 83 - DNA, 36 bp, Artificial Sequence; identical to SEQ ID NO: 51
  Synthetic Oligonucleotide

SEQ ID NO: 84 - RNA, 115 nt, Artificial Sequence
  Synthetic Oligonucleotide
gucgucuauaggacggcgaggacaacgggaagugccaaugugcucuuuccaagagcaaacaccccguuggcuucaagaugaccgcucgaaaacgagcggucugagaaguggcacu

SEQ ID NO: 85 - RNA, 113 nt, Artificial Sequence
  Synthetic Oligonucleotide
gucgucuauaggacggcgaggacaacgggaagugccaaugugcucuuuccaagagcaaacaccccguuggcuucucagaccgcucgaaaacgagcggucugagaaguggcacu

SEQ ID NO: 86 - RNA, 118 nt, Artificial Sequence
  Synthetic Oligonucleotide
acagucgucuauaggacggcgaggacaacgggaagugccaaugugcucuuuccaagagcaaacaccccguuggcuucaagaugaccgcucgaaaacgagcggucugagaaguggcacu

SEQ ID NO: 87 - RNA, 112 nt, Artificial Sequence
  Synthetic Oligonucleotide
gucuauaggacggcgaggacaacgggaagugccaaugugcucuuuccaagagcaaacaccccguuggcuucaagaugaccgcucgaaaacgagcggucugagaaguggcacu

SEQ ID NO: 88 - RNA, 111 nt, Artificial Sequence
  Synthetic Oligonucleotide
gucgucuauaggacggcgaggacaacggggugccaaugugcucuuuccaagagcaaacaccccguuggcuucucagaccgcucgaaaacgagcggucugagaaguggcacu

SEQ ID NO: 89 - RNA, 105 nt, Artificial Sequence
  Synthetic Oligonucleotide
gucgucuauaggacggcgaggacaacgggaagugccaaugugcucuuuccaagagcaaacaccccguuggcuucucagaccgaaaacggucugagaaguggcacu

SEQ ID NO: 90 - RNA, 102 nt, Artificial Sequence; identical to SEQ ID NO: 41
  Synthetic Oligonucleotide

SEQ ID NO: 91 - RNA, 97 nt, Artificial Sequence
  Synthetic Oligonucleotide
guucugucuuuuggucaggacaaccgucuagcuauaagugcugcagggugugagaaacuccuauugcuggacgaugucucuuacgaggcauuagcac

SEQ ID NO: 92 - RNA, 97 nt, Artificial Sequence
  Synthetic Oligonucleotide
guucugucuuuuggucaggacaaccgucuagcuauaagugcugcagggugugagaaacuccuauugcuggacgacgccucuuacgaggcguuagcac

SEQ ID NO: 93 - RNA, 95 nt, Artificial Sequence
  Synthetic Oligonucleotide
guucugucuuuuggucaggacaaccgucuagcuauaagugcugcagggugugagaaacuccuauugcuggacgacgccuuacgaggcguuagcac

SEQ ID NO: 94 - RNA, 92 nt, Artificial Sequence
  Synthetic Oligonucleotide
guucugucuuuuggucaggacaaccguccagcuauaagugcugcagggugcagaaacuccuauugcuggacgacgccuuacggcguuagcac

SEQ ID NO: 95 - RNA, 115 nt, Artificial Sequence
  Synthetic Oligonucleotide
guucugucuuuuggucaggacaaccguccagcuauaagugcugcagggugcagaaacuccuauugcuggacgacgccucauuuauuucaaaagaaauguuacgaggcguuagcac

SEQ ID NO: 96 - RNA, 135 nt, Artificial Sequence
  Synthetic Oligonucleotide
  misc_feature (116)..(135): n is a, c, g, or u
gucgucuauaggacggcgaggacaacgggaagugccaaugugcucuuuccaagagcaaacaccccguuggcuucaagaugaccgcucgaaaacgagcggucugagaaguggcacunnnnnnnnnnnnnnnnnnnn

SEQ ID NO: 97 - RNA, 104 nt, Artificial Sequence
  Synthetic Oligonucleotide
gaccuauagggucaaugaaucugugcgugugccauaaguaauuaaaaauuacccaccacaggauuaucuuauuucugcaaaagcagaaauaagaugauuggcac

SEQ ID NO: 98 - RNA, 107 nt, Artificial Sequence
  Synthetic Oligonucleotide
ggugaccuauagggucaaugaaucugugcgugugccauaaguaauuaaaaauuacccaacacaggauuaucuuauuucugcaaaagcagaaauaagaugauuggcac

SEQ ID NO: 99 - RNA, 101 nt, Artificial Sequence
  Synthetic Oligonucleotide
cuauagggucaaugaaucugugcgugugccauaaguaauuaaaaauuacccaccacaggauuaucuuauuucugcaaaagcagaaauaagaugauuggcac

SEQ ID NO: 100 - RNA, 88 nt, Artificial Sequence
  Synthetic Oligonucleotide
gaccuauagggucaaugaaucugugcgugugccauaaguaauuaaaaauuacccaccacaggaucaucuuaaaaaagaugauuggcac

SEQ ID NO: 101 - RNA, 98 nt, Artificial Sequence
  Synthetic Oligonucleotide
gaccuauagggucaaugaaucugugcgugugccauaaguaauuaaaaauuacccaccacaggaucaucuuauuucaaaagaaauaagaugauuggcac

SEQ ID NO: 102 - RNA, 88 nt, Artificial Sequence
  Synthetic Oligonucleotide
gaccuauagggucaaugaaucugugcgugugccauaaguaauuaaaaauuacccaccacaggagcaccugaaaacaggugcuuggcac

SEQ ID NO: 103 - RNA, 124 nt, Artificial Sequence
  Synthetic Oligonucleotide
  misc_feature (105)..(124): n is a, c, g, or u
gaccuauagggucaaaguaucugugcgugugccauaaguaauuaaaaauuacccaccacaggauuaucuuauuucugcaaaagcagaaauaagaugauuggcacnnnnnnnnnnnnnnnnnnnn

SEQ ID NO: 104 - DNA, 36 bp, Artificial Sequence; identical to SEQ ID NO: 56
  Synthetic Oligonucleotide

SEQ ID NO: 105 - DNA, 36 bp, Artificial Sequence
  Synthetic Oligonucleotide
gtgtccagggatgcttcccaggggagaagaatttgg

SEQ ID NO: 106 - DNA, 40 bp, Artificial Sequence
  Synthetic Oligonucleotide
  misc_feature (1)..(2): n is a, c, g, or t
  misc_feature (39)..(40): n is a, c, g, or t
nnccaaatccttctcccctgggaagcacacctcgacacnn

SEQ ID NO: 107 - DNA, 36 bp, Artificial Sequence; identical to SEQ ID NO: 58
  Synthetic Oligonucleotide

SEQ ID NO: 108 - DNA, 36 bp, Artificial Sequence; identical to SEQ ID NO: 57
  Synthetic Oligonucleotide

SEQ ID NO: 109 - DNA, 23 bp, Artificial Sequence
  Synthetic Oligonucleotide
  misc_feature (21)..(21): n is a, c, g, or t
agagcactggcatggggatgngg

SEQ ID NO: 110 - DNA, 23 bp, Artificial Sequence
  Synthetic Oligonucleotide
  misc_feature (21)..(21): n is a, c, g, or t
ggaacactggcatggagatgngg

SEQ ID NO: 111 - DNA, 23 bp, Artificial Sequence
  Synthetic Oligonucleotide
  misc_feature (21)..(21): n is a, c, g, or t
agaacagtggcatggggatgngg

SEQ ID NO: 112 - DNA, 23 bp, Artificial Sequence
  Synthetic Oligonucleotide
  misc_feature (21)..(21): n is a, c, g, or t
tgaacactggcatggggaagngg

SEQ ID NO: 113 - DNA, 23 bp, Artificial Sequence
  Synthetic Oligonucleotide
  misc_feature (21)..(21): n is a, c, g, or t
gaagcactgccatgggaatgngg

SEQ ID NO: 114 - DNA, 23 bp, Artificial Sequence
  Synthetic Oligonucleotide
  misc_feature (21)..(21): n is a, c, g, or t
agagcactggaatgggaatgngg

SEQ ID NO: 115 - DNA, 23 bp, Artificial Sequence
  Synthetic Oligonucleotide
  misc_feature (21)..(21): n is a, c, g, or t
ggagcgctggcatggggactngg

SEQ ID NO: 116 - DNA, 23 bp, Artificial Sequence
  Synthetic Oligonucleotide
  misc_feature (21)..(21): n is a, c, g, or t
tgaacactggcatggggctgngg

SEQ ID NO: 117 - DNA, 23 bp, Artificial Sequence
  Synthetic Oligonucleotide
  misc_feature (21)..(21): n is a, c, g, or t
agagcactggcaggaggatgngg

SEQ ID NO: 118 - DNA, 23 bp, Artificial Sequence
  Synthetic Oligonucleotide
  misc_feature (21)..(21): n is a, c, g, or t
ggagcactggcatgggatgtnga

SEQ ID NO: 119 - DNA, 23 bp, Artificial Sequence
  Synthetic Oligonucleotide
  misc_feature (21)..(21): n is a, c, g, or t
gagcccctggcatggggatgngg

SEQ ID NO: 120 - DNA, 23 bp, Artificial Sequence
  Synthetic Oligonucleotide
  misc_feature (21)..(21): n is a, c, g, or t
caggcactggcatggggaccngg

SEQ ID NO: 121 - DNA, 23 bp, Artificial Sequence
  Synthetic Oligonucleotide
  misc_feature (21)..(21): n is a, c, g, or t
aggatacaggcaggggaatgngg

SEQ ID NO: 122 - DNA, 23 bp, Artificial Sequence
  Synthetic Oligonucleotide
  misc_feature (21)..(21): n is a, c, g, or t
agaatactggcatgggaatgngg

SEQ ID NO: 123 - DNA, 23 bp, Artificial Sequence
  Synthetic Oligonucleotide
  misc_feature (21)..(21): n is a, c, g, or t
gaaggactggcacggggatgngg

SEQ ID NO: 124 - DNA, 23 bp, Artificial Sequence
  Synthetic Oligonucleotide
  misc_feature (21)..(21): n is a, c, g, or t
ggagcactggtagggggatgngg

SEQ ID NO: 125 - DNA, 23 bp, Artificial Sequence
  Synthetic Oligonucleotide
  misc_feature (21)..(21): n is a, c, g, or t
agagaactgccatgggaatgngg

SEQ ID NO: 126 - DNA, 23 bp, Artificial Sequence
  Synthetic Oligonucleotide
  misc_feature (21)..(21): n is a, c, g, or t
aaagcactggccatgggatgngg

SEQ ID NO: 127 - DNA, 23 bp, Artificial Sequence
  Synthetic Oligonucleotide
  misc_feature (21)..(21): n is a, c, g, or t
gaggcactggcatgggggtgngg

SEQ ID NO: 128 - DNA, 23 bp, Artificial Sequence
  Synthetic Oligonucleotide
  misc_feature (21)..(21): n is a, c, g, or t
agagcacgggcatgaggatcngg

SEQ ID NO: 129 - DNA, 27 bp, Artificial Sequence
  Synthetic Oligonucleotide
  misc_feature (4)..(4): n is a, c, g, or t
attntagagcactggcatggggatggg

SEQ ID NO: 130 - DNA, 27 bp, Artificial Sequence
  Synthetic Oligonucleotide
  misc_feature (4)..(4): n is a, c, g, or t
attntagagcactggcatggggatggg

SEQ ID NO: 131 - DNA, 23 bp, Artificial Sequence
  Synthetic Oligonucleotide
  misc_feature (21)..(21): n is a, c, g, or t
tgctccagaggccccccttgngg

SEQ ID NO: 132 - DNA, 23 bp, Artificial Sequence
  Synthetic Oligonucleotide
  misc_feature (21)..(21): n is a, c, g, or t
ggctccagaggctccccttgnga

SEQ ID NO: 133 - DNA, 23 bp, Artificial Sequence
  Synthetic Oligonucleotide
  misc_feature (21)..(21): n is a, c, g, or t
tgctccagaggctccccttgngg

SEQ ID NO: 134 - DNA, 23 bp, Artificial Sequence
  Synthetic Oligonucleotide
  misc_feature (21)..(21): n is a, c, g, or t
ggctccagaggcccccctgcngg

SEQ ID NO: 135 - DNA, 23 bp, Artificial Sequence
  Synthetic Oligonucleotide
  misc_feature (21)..(21): n is a, c, g, or t
agctccagagcccccccttgnga

SEQ ID NO: 136 - DNA, 23 bp, Artificial Sequence
  Synthetic Oligonucleotide
  misc_feature (21)..(21): n is a, c, g, or t
tgccccagaggcccccctcangg

SEQ ID NO: 137 - DNA, 23 bp, Artificial Sequence
  Synthetic Oligonucleotide
  misc_feature (21)..(21): n is a, c, g, or t
ggctccagaggctcccctgtngg

SEQ ID NO: 138 - DNA, 23 bp, Artificial Sequence
  Synthetic Oligonucleotide
  misc_feature (21)..(21): n is a, c, g, or t
tgctccagggacccccctctngg

SEQ ID NO: 139 - DNA, 23 bp, Artificial Sequence
  Synthetic Oligonucleotide
  misc_feature (21)..(21): n is a, c, g, or t
agctccagacactccccttgngg

SEQ ID NO: 140 - DNA, 23 bp, Artificial Sequence
  Synthetic Oligonucleotide
  misc_feature (21)..(21): n is a, c, g, or t
gtctccagaggctcccctgangg

SEQ ID NO: 141 - DNA, 23 bp, Artificial Sequence
  Synthetic Oligonucleotide
  misc_feature (21)..(21): n is a, c, g, or t
ggctccaaaaacccccctttngg

SEQ ID NO: 142 - DNA, 23 bp, Artificial Sequence
  Synthetic Oligonucleotide
  misc_feature (21)..(21): n is a, c, g, or t
tgctccaagggccccccttgnag

SEQ ID NO: 143 - DNA, 23 bp, Artificial Sequence
  Synthetic Oligonucleotide
  misc_feature (21)..(21): n is a, c, g, or t
aggtccagaggccacccttgngg

SEQ ID NO: 144 - DNA, 23 bp, Artificial Sequence
  Synthetic Oligonucleotide
  misc_feature (21)..(21): n is a, c, g, or t
atctccagaggcctccctggngg

SEQ ID NO: 145 - DNA, 23 bp, Artificial Sequence
  Synthetic Oligonucleotide
  misc_feature (21)..(21): n is a, c, g, or t
cctgccccagaggtcccttgngg

SEQ ID NO: 146 - DNA, 23 bp, Artificial Sequence
  Synthetic Oligonucleotide
  misc_feature (21)..(21): n is a, c, g, or t
tgctccagagctccccttctnga

SEQ ID NO: 147 - DNA, 23 bp, Artificial Sequence
  Synthetic Oligonucleotide
  misc_feature (21)..(21): n is a, c, g, or t
ctatccagaggctcccctccngg

SEQ ID NO: 148 - DNA, 23 bp, Artificial Sequence
  Synthetic Oligonucleotide
  misc_feature (21)..(21): n is a, c, g, or t
ctcctcagaggcccccctggngg

SEQ ID NO: 149 - DNA, 23 bp, Artificial Sequence
  Synthetic Oligonucleotide
  misc_feature (21)..(21): n is a, c, g, or t
ggctccaggggccccacttgngg

SEQ ID NO: 150 - DNA, 23 bp, Artificial Sequence
  Synthetic Oligonucleotide
  misc_feature (21)..(21): n is a, c, g, or t
ttttccagaggcccccctccngg

SEQ ID NO: 151 - DNA, 27 bp, Artificial Sequence
  Synthetic Oligonucleotide
  misc_feature (4)..(4): n is a, c, g, or t
attnttgctccagaggccccccttggg

SEQ ID NO: 152 - DNA, 27 bp, Artificial Sequence
  Synthetic Oligonucleotide
  misc_feature (4)..(4): n is a, c, g, or t
attnttgctccagaggccccccttggg

SEQ ID NO: 153 - DNA, 23 bp, Artificial Sequence
  Synthetic Oligonucleotide
  misc_feature (21)..(21): n is a, c, g, or t
ggtgccagaaacaggggtgangg

SEQ ID NO: 154 - DNA, 23 bp, Artificial Sequence
  Synthetic Oligonucleotide
  misc_feature (21)..(21): n is a, c, g, or t
ggtaccagaaacaggggggangg

SEQ ID NO: 155 - DNA, 23 bp, Artificial Sequence
  Synthetic Oligonucleotide
gctgccaggaacagaggtgaggg

SEQ ID NO: 156 - DNA, 23 bp, Artificial Sequence
  Synthetic Oligonucleotide
  misc_feature (21)..(21): n is a, c, g, or t
ggttccagaaagaggggtgangg

SEQ ID NO: 157 - DNA, 23 bp, Artificial Sequence
  Synthetic Oligonucleotide
  misc_feature (21)..(21): n is a, c, g, or t
aatgccaggaacaggggtggngg

SEQ ID NO: 158 - DNA, 22 bp, Artificial Sequence
  Synthetic Oligonucleotide
  misc_feature (20)..(20): n is a, c, g, or t
gggccagaaacaggggtgangg

SEQ ID NO: 159 - DNA, 23 bp, Artificial Sequence
  Synthetic Oligonucleotide
  misc_feature (21)..(21): n is a, c, g, or t
caagccagaaacaggggtgangg

SEQ ID NO: 160 - DNA, 23 bp, Artificial Sequence
  Synthetic Oligonucleotide
  misc_feature (21)..(21): n is a, c, g, or t
ggtatcagaagcaggggtgangg

SEQ ID NO: 161 - DNA, 23 bp, Artificial Sequence
  Synthetic Oligonucleotide
  misc_feature (21)..(21): n is a, c, g, or t
gaggccagaaaaaggggtgangg

SEQ ID NO: 162 - DNA, 23 bp, Artificial Sequence
  Synthetic Oligonucleotide
  misc_feature (21)..(21): n is a, c, g, or t
ggtggcaggaacaggggtggngg

SEQ ID NO: 163 - DNA, 23 bp, Artificial Sequence
  Synthetic Oligonucleotide
  misc_feature (21)..(21): n is a, c, g, or t
agtgacagaaacaggaatgangg

SEQ ID NO: 164 - DNA, 23 bp, Artificial Sequence
  Synthetic Oligonucleotide
  misc_feature (21)..(21): n is a, c, g, or t
gaagccagaagcaggggtgangg

SEQ ID NO: 165 - DNA, 23 bp, Artificial Sequence
  Synthetic Oligonucleotide
  misc_feature (21)..(21): n is a, c, g, or t
ggagccagaagcaggggagangg

SEQ ID NO: 166 - DNA, 23 bp, Artificial Sequence
  Synthetic Oligonucleotide
  misc_feature (21)..(21): n is a, c, g, or t
ggagccagaaacagggatggngg

SEQ ID NO: 167 - DNA, 23 bp, Artificial Sequence
  Synthetic Oligonucleotide
  misc_feature (21)..(21): n is a, c, g, or t
agtaccaggaacaggggagtngg

SEQ ID NO: 168 - DNA, 23 bp, Artificial Sequence
  Synthetic Oligonucleotide
  misc_feature (21)..(21): n is a, c, g, or t
agtgccaggagcaggggagangg

SEQ ID NO: 169 - DNA, 23 bp, Artificial Sequence
  Synthetic Oligonucleotide
  misc_feature (21)..(21): n is a, c, g, or t
ggtaccaaaaaaaggggagangg

SEQ ID NO: 170 - DNA, 23 bp, Artificial Sequence
  Synthetic Oligonucleotide
  misc_feature (21)..(21): n is a, c, g, or t
gatgccagaggcaggggagangg

SEQ ID NO: 171 - DNA, 23 bp, Artificial Sequence
  Synthetic Oligonucleotide
  misc_feature (21)..(21): n is a, c, g, or t
agggccagaaacaggagggangg

SEQ ID NO: 172 - DNA, 23 bp, Artificial Sequence
  Synthetic Oligonucleotide
  misc_feature (21)..(21): n is a, c, g, or t
ggtgccaggaacgggggtgangg

SEQ ID NO: 173 - DNA, 27 bp, Artificial Sequence
  Synthetic Oligonucleotide
  misc_feature (4)..(4): n is a, c, g, or t
attnctggtgccagaaacaggggtgac

SEQ ID NO: 174 - DNA, 27 bp, Artificial Sequence
  Synthetic Oligonucleotide
  misc_feature (4)..(4): n is a, c, g, or t
attnctggtgccagaaacaggggtgac

SEQ ID NO: 175 - DNA, 23 bp, Artificial Sequence
  Synthetic Oligonucleotide
gggcttcaagcaacttgtagcgg

SEQ ID NO: 176 - DNA, 27 bp, Artificial Sequence
  Synthetic Oligonucleotide
  misc_feature (4)..(4): n is a, c, g, or t
attntgggcttcaagcaacttgtagtg

SEQ ID NO: 177 - DNA, 27 bp, Artificial Sequence
  Synthetic Oligonucleotide
  misc_feature (4)..(4): n is a, c, g, or t
attntgggcttcaagcaacttgtagtg

SEQ ID NO: 178 - DNA, 23 bp, Artificial Sequence
  Synthetic Oligonucleotide
  misc_feature (21)..(21): n is a, c, g, or t
gtaattggttctaccaaagangg

SEQ ID NO: 179 - DNA, 23 bp, Artificial Sequence
  Synthetic Oligonucleotide
  misc_feature (21)..(21): n is a, c, g, or t
ttaattggttctaccaaagangg

SEQ ID NO: 180 - DNA, 27 bp, Artificial Sequence
  Synthetic Oligonucleotide
  misc_feature (4)..(4): n is a, c, g, or t
attntgtaattggttctaccaaagaag

SEQ ID NO: 181 - DNA, 27 bp, Artificial Sequence
  Synthetic Oligonucleotide
  misc_feature (4)..(4): n is a, c, g, or t
attntgtaattggttctaccaaagaag

SEQ ID NO: 182 - DNA, 23 bp, Artificial Sequence
  Synthetic Oligonucleotide
  misc_feature (21)..(21): n is a, c, g, or t
gaggcggagggcggcgtgccngg

SEQ ID NO: 183 - DNA, 23 bp, Artificial Sequence
  Synthetic Oligonucleotide
  misc_feature (21)..(21): n is a, c, g, or t
aaggccgagggcagcatgccngg

SEQ ID NO: 184 - DNA, 23 bp, Artificial Sequence
  Synthetic Oligonucleotide
  misc_feature (21)..(21): n is a, c, g, or t
tgggcggagggaggcgcaccngg

SEQ ID NO: 185 - DNA, 27 bp, Artificial Sequence
  Synthetic Oligonucleotide
  misc_feature (4)..(4): n is a, c, g, or t
attnagaggcggagggcggcgtgcctg

SEQ ID NO: 186 - DNA, 27 bp, Artificial Sequence
  Synthetic Oligonucleotide
  misc_feature (4)..(4): n is a, c, g, or t
attnagaggcggagggcggcgtgcctg

SEQ ID NO: 187 - DNA, 23 bp, Artificial Sequence
  Synthetic Oligonucleotide
  misc_feature (21)..(21): n is a, c, g, or t
agtgtccagggatgcttcccngg

SEQ ID NO: 188 - DNA, 23 bp, Artificial Sequence
  Synthetic Oligonucleotide
  misc_feature (21)..(21): n is a, c, g, or t
catccccagggaagcatcccngg

SEQ ID NO: 189 - DNA, 23 bp, Artificial Sequence
  Synthetic Oligonucleotide
  misc_feature (21)..(21): n is a, c, g, or t
agtggctagggatgcttcccngg

SEQ ID NO: 190 - DNA, 23 bp, Artificial Sequence
  Synthetic Oligonucleotide
  misc_feature (21)..(21): n is a, c, g, or t
atagtccagggatgcttcctngg

SEQ ID NO: 191 - DNA, 23 bp, Artificial Sequence
  Synthetic Oligonucleotide
  misc_feature (21)..(21): n is a, c, g, or t
cgtgaccagggatgcttctcngg

SEQ ID NO: 192 - DNA, 23 bp, Artificial Sequence
  Synthetic Oligonucleotide
  misc_feature (21)..(21): n is a, c, g, or t
gctccccggggaagcttcccnga

SEQ ID NO: 193 - DNA, 23 bp, Artificial Sequence
  Synthetic Oligonucleotide
  misc_feature (21)..(21): n is a, c, g, or t
catgtccagaaatgcttcccngg

SEQ ID NO: 194 - DNA, 23 bp, Artificial Sequence
  Synthetic Oligonucleotide
  misc_feature (21)..(21): n is a, c, g, or t
agtgtccagggatgcttcccnag

SEQ ID NO: 195 - DNA, 23 bp, Artificial Sequence
  Synthetic Oligonucleotide
  misc_feature (21)..(21): n is a, c, g, or t
tcggtccagggatgcttcccntg

SEQ ID NO: 196 - DNA, 23 bp, Artificial Sequence
  Synthetic Oligonucleotide
  misc_feature (21)..(21): n is a, c, g, or t
caagtccatggatgcttcccngg

SEQ ID NO: 197 - DNA, 23 bp, Artificial Sequence
  Synthetic Oligonucleotide
  misc_feature (21)..(21): n is a, c, g, or t
ccagtccaggaaagcatcccngg

SEQ ID NO: 198 - DNA, 23 bp, Artificial Sequence
  Synthetic Oligonucleotide
  misc_feature (21)..(21): n is a, c, g, or t
cctggcctggggagcatcccnga

SEQ ID NO: 199 - DNA, 23 bp, Artificial Sequence
  Synthetic Oligonucleotide
  misc_feature (21)..(21): n is a, c, g, or t
tgtgtgcagggatgcttcctngg

SEQ ID NO: 200 - DNA, 23 bp, Artificial Sequence
  Synthetic Oligonucleotide
  misc_feature (21)..(21): n is a, c, g, or t
agactccagggaagcttcccngg

SEQ ID NO: 201 - DNA, 23 bp, Artificial Sequence
  Synthetic Oligonucleotide
  misc_feature (21)..(21): n is a, c, g, or t
agggtccaggcacgcttcccngg

SEQ ID NO: 202 - DNA, 23 bp, Artificial Sequence
  Synthetic Oligonucleotide
  misc_feature (21)..(21): n is a, c, g, or t
tgtttccaggaatgcttcccngg

SEQ ID NO: 203 - DNA, 23 bp, Artificial Sequence
  Synthetic Oligonucleotide
  misc_feature (21)..(21): n is a, c, g, or t
agagtccaggaatgcttcccnga

SEQ ID NO: 204 - DNA, 23 bp, Artificial Sequence
  Synthetic Oligonucleotide
  misc_feature (21)..(21): n is a, c, g, or t
atgtcacagggattcttcccngg

SEQ ID NO: 205 - DNA, 23 bp, Artificial Sequence
  Synthetic Oligonucleotide
  misc_feature (21)..(21): n is a, c, g, or t
caagtccagagatgcttcctngg

SEQ ID NO: 206 - DNA, 23 bp, Artificial Sequence
  Synthetic Oligonucleotide
  misc_feature (21)..(21): n is a, c, g, or t
agtgtccagggaagcttcgcngg

SEQ ID NO: 207 - DNA, 27 bp, Artificial Sequence
  Synthetic Oligonucleotide
  misc_feature (4)..(4): n is a, c, g, or t
tttnggaagtgtccagggatgcttccc

SEQ ID NO: 208 - DNA, 27 bp, Artificial Sequence
  Synthetic Oligonucleotide
  misc_feature (4)..(4): n is a, c, g, or t
tttnggaagtgtccagggatgcttccc

SEQ ID NO: 209 - DNA, 27 bp, Artificial Sequence
  Synthetic Oligonucleotide
  misc_feature (4)..(4): n is a, c, g, or t
tttnggaagtgtccagggatgcttccc

SEQ ID NO: 210 - DNA, 23 bp, Artificial Sequence
  Synthetic Oligonucleotide
  misc_feature (21)..(21): n is a, c, g, or t
ttcagcccaagaacagtacangg

SEQ ID NO: 211 - DNA, 23 bp, Artificial Sequence
  Synthetic Oligonucleotide
  misc_feature (21)..(21): n is a, c, g, or t
aacagtccaagaacagtacangg

SEQ ID NO: 212 - DNA, 23 bp, Artificial Sequence
  Synthetic Oligonucleotide
  misc_feature (21)..(21): n is a, c, g, or t
tatagctcaagaacagtacangg

SEQ ID NO: 213 - DNA, 27 bp, Artificial Sequence
  Synthetic Oligonucleotide
  misc_feature (4)..(4): n is a, c, g, or t
tttncttcagcccaagaacagtacaag

SEQ ID NO: 214 - DNA, 27 bp, Artificial Sequence
  Synthetic Oligonucleotide
  misc_feature (4)..(4): n is a, c, g, or t
tttncttcagcccaagaacagtacaag

SEQ ID NO: 215 - DNA, 27 bp, Artificial Sequence
  Synthetic Oligonucleotide
  misc_feature (4)..(4): n is a, c, g, or t
tttncttcagcccaagaacagtacaag

SEQ ID NO: 216 - DNA, 23 bp, Artificial Sequence
  Synthetic Oligonucleotide
  misc_feature (21)..(21): n is a, c, g, or t
gtgagtcgaggagaaacgacngg

SEQ ID NO: 217 - DNA, 23 bp, Artificial Sequence
  Synthetic Oligonucleotide
  misc_feature (21)..(21): n is a, c, g, or t
atgagccaaggagagacgaangg

SEQ ID NO: 218 - DNA, 23 bp, Artificial Sequence
  Synthetic Oligonucleotide
  misc_feature (21)..(21): n is a, c, g, or t
atgagtagaggagaaaagacngg

SEQ ID NO: 219 - DNA, 27 bp, Artificial Sequence
  Synthetic Oligonucleotide
  misc_feature (4)..(4): n is a, c, g, or t
tttntctgtgagtcgaggagaaacgac

SEQ ID NO: 220 - DNA, 27 bp, Artificial Sequence
  Synthetic Oligonucleotide
  misc_feature (4)..(4): n is a, c, g, or t
tttntctgtgagtcgaggagaaacgac

SEQ ID NO: 221 - DNA, 27 bp, Artificial Sequence
  Synthetic Oligonucleotide
  misc_feature (4)..(4): n is a, c, g, or t
tttntctgtgagtcgaggagaaacgac

SEQ ID NO: 222 - DNA, 23 bp, Artificial Sequence
  Synthetic Oligonucleotide
  misc_feature (21)..(21): n is a, c, g, or t
gggtgtgttaaaagtgaccangg

SEQ ID NO: 223 - DNA, 27 bp, Artificial Sequence
  Synthetic Oligonucleotide
  misc_feature (4)..(4): n is a, c, g, or t
tttncttgggtgtgttaaaagtgacca

SEQ ID NO: 224 - DNA, 27 bp, Artificial Sequence
  Synthetic Oligonucleotide
  misc_feature (4)..(4): n is a, c, g, or t
tttncttgggtgtgttaaaagtgacca

SEQ ID NO: 225 - DNA, 27 bp, Artificial Sequence
  Synthetic Oligonucleotide
  misc_feature (4)..(4): n is a, c, g, or t
tttncttgggtgtgttaaaagtgacca

SEQ ID NO: 226 - DNA, 23 bp, Artificial Sequence
  Synthetic Oligonucleotide
  misc_feature (21)..(21): n is a, c, g, or t
tcactcctgctcggtgaattngg

SEQ ID NO: 227 - DNA, 23 bp, Artificial Sequence
  Synthetic Oligonucleotide
gctacaggcagagacaaaggcgg

SEQ ID NO: 228 - DNA, 23 bp, Artificial Sequence
  Synthetic Oligonucleotide
aggacaggcagagacaaaggcgg

SEQ ID NO: 229 - DNA, 23 bp, Artificial Sequence
  Synthetic Oligonucleotide
agaacaggcagagacaaagacgg

SEQ ID NO: 230 - DNA, 23 bp, Artificial Sequence
  Synthetic Oligonucleotide
aagacaggcagagacaaagtcgg

SEQ ID NO: 231 - DNA, 23 bp, Artificial Sequence
  Synthetic Oligonucleotide
gctagaggtagagacaaaggcgg

SEQ ID NO: 232 - DNA, 23 bp, Artificial Sequence
  Synthetic Oligonucleotide
agaacaggcagagacaaaggcag

SEQ ID NO: 233 - DNA, 23 bp, Artificial Sequence
  Synthetic Oligonucleotide
aggacaggcagagacaaaggcgg

SEQ ID NO: 234 - DNA, 23 bp, Artificial Sequence
  Synthetic Oligonucleotide
aggacaggcagagacaaagtcgg

SEQ ID NO: 235 - DNA, 23 bp, Artificial Sequence
  Synthetic Oligonucleotide
cggacaggcagagacaaaggcgg

SEQ ID NO: 236 - DNA, 23 bp, Artificial Sequence
  Synthetic Oligonucleotide
acaacagccagagacaaaggcgg

SEQ ID NO: 237 - DNA, 23 bp, Artificial Sequence
  Synthetic Oligonucleotide
agaacaggcagagacaaagtcgg

SEQ ID NO: 238 - DNA, 23 bp, Artificial Sequence
  Synthetic Oligonucleotide
cctagaggcagagacaaagtcgg

SEQ ID NO: 239 - DNA, 23 bp, Artificial Sequence
  Synthetic Oligonucleotide
gctacagacagagacaaaggcag

SEQ ID NO: 240 - DNA, 23 bp, Artificial Sequence
  Synthetic Oligonucleotide
gctacaggcagagacaaaggcgg

SEQ ID NO: 241 - DNA, 23 bp, Artificial Sequence
  Synthetic Oligonucleotide
actacaaacagagacaaagacgg

SEQ ID NO: 242 - DNA, 23 bp, Artificial Sequence
  Synthetic Oligonucleotide
tctacagtcagagacaaaggcga

SEQ ID NO: 243 - DNA, 23 bp, Artificial Sequence
  Synthetic Oligonucleotide
aagataggcagagacaaaggcgg

SEQ ID NO: 244 - DNA, 23 bp, Artificial Sequence
  Synthetic Oligonucleotide
cctataggcagagacaaagccgg

SEQ ID NO: 245 - DNA, 23 bp, Artificial Sequence
  Synthetic Oligonucleotide
aagacaggcagagacaaagtcgg

SEQ ID NO: 246 - DNA, 23 bp, Artificial Sequence
  Synthetic Oligonucleotide
aggacaggcagagacaaaggcag

SEQ ID NO: 247 - DNA, 23 bp, Artificial Sequence
  Synthetic Oligonucleotide
  misc_feature (21)..(21): n is a, c, g, or t
aggtcagaaatagggggtccngg

SEQ ID NO: 248 - DNA, 23 bp, Artificial Sequence
  Synthetic Oligonucleotide
  misc_feature (21)..(21): n is a, c, g, or t
agggcacaaataggaggtccngg

SEQ ID NO: 249 - DNA, 23 bp, Artificial Sequence
  Synthetic Oligonucleotide
caggctgtgaaccttggtggcgg

SEQ ID NO: 250 - DNA, 23 bp, Artificial Sequence
  Synthetic Oligonucleotide
ctggctgtgaactttggtggcgg

SEQ ID NO: 251 - DNA, 23 bp, Artificial Sequence
  Synthetic Oligonucleotide
aggactgtagaccttggtggcgg

SEQ ID NO: 252 - DNA, 23 bp, Artificial Sequence
  Synthetic Oligonucleotide
atagctgtgaacctaggtggcgg

SEQ ID NO: 253 - DNA, 23 bp, Artificial Sequence
  Synthetic Oligonucleotide
caggctgtgaaccttggtgacgg

SEQ ID NO: 254 - DNA, 23 bp, Artificial Sequence
  Synthetic Oligonucleotide
cctgctatgaaccttggtgtcgg

SEQ ID NO: 255 - DNA, 23 bp, Artificial Sequence
  Synthetic Oligonucleotide
ggggctgcggaccttggtggcgg

SEQ ID NO: 256 - DNA, 23 bp, Artificial Sequence
  Synthetic Oligonucleotide
aaagctgagaaccttggtggcgg

SEQ ID NO: 257 - DNA, 23 bp, Artificial Sequence
  Synthetic Oligonucleotide
cttgctgggaaccttggtggcgg

SEQ ID NO: 258 - DNA, 23 bp, Artificial Sequence
  Synthetic Oligonucleotide
caggctgagacccttggtggcgg

SEQ ID NO: 259 - DNA, 23 bp, Artificial Sequence
  Synthetic Oligonucleotide
caggctgtgcactttggtggcgg

SEQ ID NO: 260 - DNA, 23 bp, Artificial Sequence
  Synthetic Oligonucleotide
attgctgcaaaccttggtgtcgg

SEQ ID NO: 261 - DNA, 23 bp, Artificial Sequence
  Synthetic Oligonucleotide
taggctgtaaaacttggtggcgg

SEQ ID NO: 262 - DNA, 23 bp, Artificial Sequence
  Synthetic Oligonucleotide
aaagctgggaaccttggtggcgg

SEQ ID NO: 263 - DNA, 23 bp, Artificial Sequence
  Synthetic Oligonucleotide
aggcctgagaaccttggtggcag

SEQ ID NO: 264 - DNA, 23 bp, Artificial Sequence
  Synthetic Oligonucleotide
caggctttgaactttggtagcgg

SEQ ID NO: 265 - DNA, 23 bp, Artificial Sequence
  Synthetic Oligonucleotide
caggctgttacccttggtggcgg

SEQ ID NO: 266 - DNA, 23 bp, Artificial Sequence
  Synthetic Oligonucleotide
gcagcctgtagccttggtggcgg

SEQ ID NO: 267 - DNA, 23 bp, Artificial Sequence
  Synthetic Oligonucleotide
agggatgtgaaccttggtagcag

SEQ ID NO: 268 - DNA, 23 bp, Artificial Sequence
  Synthetic Oligonucleotide
cctgctgcaaaccttggtgtcgg

SEQ ID NO: 269 - DNA, 23 bp, Artificial Sequence
  Synthetic Oligonucleotide
  misc_feature (21)..(21): n is a, c, g, or t
gaccccctccaccccgcctcngg

SEQ ID NO: 270 - DNA, 23 bp, Artificial Sequence
  Synthetic Oligonucleotide
  misc_feature (21)..(21): n is a, c, g, or t
ctgcccccccaccccgccacngg

SEQ ID NO: 271 - DNA, 23 bp, Artificial Sequence
  Synthetic Oligonucleotide
  misc_feature (21)..(21): n is a, c, g, or t
gcccccacccaccccgcctcngg

SEQ ID NO: 272 - DNA, 23 bp, Artificial Sequence
  Synthetic Oligonucleotide
  misc_feature (21)..(21): n is a, c, g, or t
gcttccctccaccccgcatcngg

SEQ ID NO: 273 - DNA, 23 bp, Artificial Sequence
  Synthetic Oligonucleotide
  misc_feature (21)..(21): n is a, c, g, or t
tgcccctcccaccccgcctcngg

SEQ ID NO: 274 - DNA, 23 bp, Artificial Sequence
  Synthetic Oligonucleotide
  misc_feature (21)..(21): n is a, c, g, or t
ctacccctccaccccgcctcngg

SEQ ID NO: 275 - DNA, 23 bp, Artificial Sequence
  Synthetic Oligonucleotide
  misc_feature (21)..(21): n is a, c, g, or t
gggcccctccaccccgcctcngg

SEQ ID NO: 276 - DNA, 23 bp, Artificial Sequence
  Synthetic Oligonucleotide
  misc_feature (21)..(21): n is a, c, g, or t
attcccccccaccccgcctcngg

SEQ ID NO: 277 - DNA, 23 bp, Artificial Sequence
  Synthetic Oligonucleotide
  misc_feature (21)..(21): n is a, c, g, or t
gaccccccccaccccgccccngg

SEQ ID NO: 278 - DNA, 23 bp, Artificial Sequence
  Synthetic Oligonucleotide
  misc_feature (21)..(21): n is a, c, g, or t
acacccccccaccccgcctcngg

SEQ ID NO: 279 - DNA, 23 bp, Artificial Sequence
  Synthetic Oligonucleotide
  misc_feature (21)..(21): n is a, c, g, or t
gccccccaccaccccacctcngg

SEQ ID NO: 280 - DNA, 23 bp, Artificial Sequence
  Synthetic Oligonucleotide
  misc_feature (21)..(21): n is a, c, g, or t
ctccccacccaccccgcctcngg

SEQ ID NO: 281 - DNA, 23 bp, Artificial Sequence
  Synthetic Oligonucleotide
  misc_feature (21)..(21): n is a, c, g, or t
tgccccccccaccccacctcngg

SEQ ID NO: 282 - DNA, 23 bp, Artificial Sequence
  Synthetic Oligonucleotide
  misc_feature (21)..(21): n is a, c, g, or t
taccccccacaccccgcctcngg

SEQ ID NO: 283 - DNA, 23 bp, Artificial Sequence
  Synthetic Oligonucleotide
  misc_feature (21)..(21): n is a, c, g, or t
gtaccccaccaccccgccccngg

SEQ ID NO: 284 - DNA, 23 bp, Artificial Sequence
  Synthetic Oligonucleotide
  misc_feature (21)..(21): n is a, c, g, or t
gacaccttccaccccgtctcngg

SEQ ID NO: 285 - DNA, 23 bp, Artificial Sequence
  Synthetic Oligonucleotide
  misc_feature (21)..(21): n is a, c, g, or t
cctcccccacaccccgcatcngg

SEQ ID NO: 286 - DNA, 23 bp, Artificial Sequence
  Synthetic Oligonucleotide
  misc_feature (21)..(21): n is a, c, g, or t
gacccctcacaccccgccccngg

SEQ ID NO: 287 - DNA, 23 bp, Artificial Sequence
  Synthetic Oligonucleotide
  misc_feature (21)..(21): n is a, c, g, or t
tccaccccccaccccgccccngg

SEQ ID NO: 288 - DNA, 23 bp, Artificial Sequence
  Synthetic Oligonucleotide
  misc_feature (21)..(21): n is a, c, g, or t
atccccctccaccccaccccngg

SEQ ID NO: 289 - DNA, 23 bp, Artificial Sequence
  Synthetic Oligonucleotide
  misc_feature (21)..(21): n is a, c, g, or t
tatctagcctcttctaagacngg

SEQ ID NO: 290 - DNA, 23 bp, Artificial Sequence
  Synthetic Oligonucleotide
  misc_feature (21)..(21): n is a, c, g, or t
tatctagcctcttctaaaacngg

SEQ ID NO: 291 - DNA, 27 bp, Artificial Sequence
  Synthetic Oligonucleotide
  misc_feature (4)..(4): n is a, c, g, or t
tttncctcactcctgctcggtgaattt

SEQ ID NO: 292 - DNA, 27 bp, Artificial Sequence
  Synthetic Oligonucleotide
  misc_feature (4)..(4): n is a, c, g, or t
tttnggaggtcagaaatagggggtcca

SEQ ID NO: 293 - DNA, 27 bp, Artificial Sequence
  Synthetic Oligonucleotide
  misc_feature (4)..(4): n is a, c, g, or t
tttngcaggtcagaaatagggagaggc

SEQ ID NO: 294 - DNA, 27 bp, Artificial Sequence
  Synthetic Oligonucleotide
  misc_feature (4)..(4): n is a, c, g, or t
tttngatggcgacttcaggcacaggat

SEQ ID NO: 295 - DNA, 27 bp, Artificial Sequence
  Synthetic Oligonucleotide
  misc_feature (4)..(4): n is a, c, g, or t
tttncttgggtgtgttaaaagtgacca

SEQ ID NO: 296 - DNA, 23 bp, Artificial Sequence
  Synthetic Oligonucleotide
  misc_feature (21)..(21): n is a, c, g, or t
tctcccctgggaagcatcccngg

SEQ ID NO: 297 - DNA, 23 bp, Artificial Sequence
  Synthetic Oligonucleotide
  misc_feature (21)..(21): n is a, c, g, or t
catccccagggaagcatcccngg

SEQ ID NO: 298 - DNA, 23 bp, Artificial Sequence
  Synthetic Oligonucleotide
  misc_feature (21)..(21): n is a, c, g, or t
gatcccctgtgaagcatcccngg

SEQ ID NO: 299 - DNA, 23 bp, Artificial Sequence
  Synthetic Oligonucleotide
  misc_feature (21)..(21): n is a, c, g, or t
tctccccggggaaacatcccngg

SEQ ID NO: 300 - DNA, 23 bp, Artificial Sequence
  Synthetic Oligonucleotide
  misc_feature (21)..(21): n is a, c, g, or t
tctcccccaggaaccatcccngg

SEQ ID NO: 301 - DNA, 23 bp, Artificial Sequence
  Synthetic Oligonucleotide
  misc_feature (21)..(21): n is a, c, g, or t
cttcctctgggaagcatcccngg

SEQ ID NO: 302 - DNA, 23 bp, Artificial Sequence
  Synthetic Oligonucleotide
  misc_feature (21)..(21): n is a, c, g, or t
cctccactggaaagcatcccngg

SEQ ID NO: 303 - DNA, 23 bp, Artificial Sequence
  Synthetic Oligonucleotide
  misc_feature (21)..(21): n is a, c, g, or t
cctcctccgggaagcaccccngg

SEQ ID NO: 304 - DNA, 23 bp, Artificial Sequence
  Synthetic Oligonucleotide
  misc_feature (21)..(21): n is a, c, g, or t
tggcccctgggaagcaccccngg

SEQ ID NO: 305 - DNA, 23 bp, Artificial Sequence
  Synthetic Oligonucleotide
  misc_feature (21)..(21): n is a, c, g, or t
tctcccctgggatgcatcccnga

SEQ ID NO: 306 - DNA, 23 bp, Artificial Sequence
  Synthetic Oligonucleotide
  misc_feature (21)..(21): n is a, c, g, or t
actcccctgggagctatcccngg

SEQ ID NO: 307 - DNA, 23 bp, Artificial Sequence
  Synthetic Oligonucleotide
  misc_feature (21)..(21): n is a, c, g, or t
cgtcctctgggaggcatcccngg

SEQ ID NO: 308 - DNA, 23 bp, Artificial Sequence
  Synthetic Oligonucleotide
  misc_feature (21)..(21): n is a, c, g, or t
tctcccctaggaaacataccngg

SEQ ID NO: 309 - DNA, 23 bp, Artificial Sequence
  Synthetic Oligonucleotide
  misc_feature (21)..(21): n is a, c, g, or t
actctcctgggaagcatcccngc

SEQ ID NO: 310 - DNA, 23 bp, Artificial Sequence
  Synthetic Oligonucleotide
  misc_feature (21)..(21): n is a, c, g, or t
gctcccccgggcggcatcccngg

SEQ ID NO: 311 - DNA, 23 bp, Artificial Sequence
  Synthetic Oligonucleotide
  misc_feature (21)..(21): n is a, c, g, or t
cctccccagggaggcatcctngg

SEQ ID NO: 312 - DNA, 23 bp, Artificial Sequence
  Synthetic Oligonucleotide
  misc_feature (21)..(21): n is a, c, g, or t
tctcccctgggaagcatcccngg

SEQ ID NO: 313 - DNA, 23 bp, Artificial Sequence
  Synthetic Oligonucleotide
  misc_feature (21)..(21): n is a, c, g, or t
gagttagagcagaagaagaangg

SEQ ID NO: 314 - DNA, 23 bp, Artificial Sequence
  Synthetic Oligonucleotide
  misc_feature (21)..(21): n is a, c, g, or t
gagtctaagcagaagaagaanag

SEQ ID NO: 315 - DNA, 23 bp, Artificial Sequence
  Synthetic Oligonucleotide
  misc_feature (21)..(21): n is a, c, g, or t
gaggccgagcagaagaaagangg

SEQ ID NO: 316 - DNA, 23 bp, Artificial Sequence
  Synthetic Oligonucleotide
  misc_feature (21)..(21): n is a, c, g, or t
gagtcctagcaggagaagaanag

SEQ ID NO: 317 - DNA, 23 bp, Artificial Sequence
  Synthetic Oligonucleotide
  misc_feature (21)..(21): n is a, c, g, or t
gagtccgggaaggagaagaangg

SEQ ID NO: 318 - DNA, 23 bp, Artificial Sequence
  Synthetic Oligonucleotide
  misc_feature (21)..(21): n is a, c, g, or t
acgtctgagcagaagaagaangg

SEQ ID NO: 319 - DNA, 23 bp, Artificial Sequence
  Synthetic Oligonucleotide
  misc_feature (21)..(21): n is a, c, g, or t
gaatccaagcaggagaagaanga

SEQ ID NO: 320 - DNA, 23 bp, Artificial Sequence
  Synthetic Oligonucleotide
  misc_feature (21)..(21): n is a, c, g, or t
gagccggagcagaagaaggangg

SEQ ID NO: 321 - DNA, 23 bp, Artificial Sequence
  Synthetic Oligonucleotide
  misc_feature (21)..(21): n is a, c, g, or t
tatctagcctcttctaagacngg

SEQ ID NO: 322 - DNA, 23 bp, Artificial Sequence
  Synthetic Oligonucleotide
  misc_feature (21)..(21): n is a, c, g, or t
tatctagcctcttctaaaacngg

SEQ ID NO: 323 - DNA, 23 bp, Artificial Sequence
  Synthetic Oligonucleotide
  misc_feature (21)..(21): n is a, c, g, or t
ttttgggagtaagaaaaggtngg

SEQ ID NO: 324 - DNA, 23 bp, Artificial Sequence
  Synthetic Oligonucleotide
  misc_feature (21)..(21): n is a, c, g, or t
atttggtagtaagaaaaggtngg

SEQ ID NO: 325 - DNA, 23 bp, Artificial Sequence
  Synthetic Oligonucleotide
  misc_feature (21)..(21): n is a, c, g, or t
ggatgggagtgagaaaaggtngg

SEQ ID NO: 326 - DNA, 23 bp, Artificial Sequence
  Synthetic Oligonucleotide
  misc_feature (21)..(21): n is a, c, g, or t
agaagggagtaagaaaaaggngg

SEQ ID NO: 327 - DNA, 23 bp, Artificial Sequence
  Synthetic Oligonucleotide
  misc_feature (21)..(21): n is a, c, g, or t
gcatgggagtaagagaaggangg

SEQ ID NO: 328 - DNA, 23 bp, Artificial Sequence
  Synthetic Oligonucleotide
  misc_feature (21)..(21): n is a, c, g, or t
actggggagaaagaaaaggcngg

SEQ ID NO: 329 - DNA, 23 bp, Artificial Sequence
  Synthetic Oligonucleotide
  misc_feature (21)..(21): n is a, c, g, or t
ctgggggactaagaaaaggtngg

SEQ ID NO: 330 - DNA, 23 bp, Artificial Sequence
  Synthetic Oligonucleotide
  misc_feature (21)..(21): n is a, c, g, or t
taggaggagtaagaaaaggtngg

SEQ ID NO: 331 - DNA, 23 bp, Artificial Sequence
  Synthetic Oligonucleotide
  misc_feature (21)..(21): n is a, c, g, or t
ccgggggcgtaagaaaaggtngg

SEQ ID NO: 332 - DNA, 23 bp, Artificial Sequence
  Synthetic Oligonucleotide
  misc_feature (21)..(21): n is a, c, g, or t
agatgggagtaagagaaggtntg

SEQ ID NO: 333 - DNA, 23 bp, Artificial Sequence
  Synthetic Oligonucleotide
  misc_feature (21)..(21): n is a, c, g, or t
gttggggagtaagagaaggangg

SEQ ID NO: 334 - DNA, 23 bp, Artificial Sequence
  Synthetic Oligonucleotide
  misc_feature (21)..(21): n is a, c, g, or t
ctaagggagtaagaaaaggangg

SEQ ID NO: 335 - DNA, 27 bp, Artificial Sequence
  Synthetic Oligonucleotide
  misc_feature (4)..(4): n is a, c, g, or t
attncccttcagctaaaataaaggagg

SEQ ID NO: 336 - DNA, 27 bp, Artificial Sequence
  Synthetic Oligonucleotide
  misc_feature (4)..(4): n is a, c, g, or t
attnggctcagcaggcacctgcctcag

SEQ ID NO: 337 - DNA, 27 bp, Artificial Sequence
  Synthetic Oligonucleotide
  misc_feature (4)..(4): n is a, c, g, or t
attngggactggagttgcttcatgtac

SEQ ID NO: 338 - DNA, 27 bp, Artificial Sequence
  Synthetic Oligonucleotide
  misc_feature (4)..(4): n is a, c, g, or t
attntctccatgaaaaatactggggtc

SEQ ID NO: 339 - DNA, 27 bp, Artificial Sequence
  Synthetic Oligonucleotide
  misc_feature (4)..(4): n is a, c, g, or t
attnttcatggagaaaatattcagaat

SEQ ID NO: 340 - DNA, 27 bp, Artificial Sequence
  Synthetic Oligonucleotide
  misc_feature (4)..(4): n is a, c, g, or t
attnttcatgaagaaaatattcaggaa

SEQ ID NO: 341 - DNA, 27 bp, Artificial Sequence
  Synthetic Oligonucleotide
  misc_feature (4)..(4): n is a, c, g, or t
attngcagctacaggcagagacaaagg

SEQ ID NO: 342 - DNA, 27 bp, Artificial Sequence
  Synthetic Oligonucleotide
  misc_feature (4)..(4): n is a, c, g, or t
attncctggaaaccatccaggccttgt

SEQ ID NO: 343 - DNA, 27 bp, Artificial Sequence
  Synthetic Oligonucleotide
  misc_feature (4)..(4): n is a, c, g, or t
attnggtcagctgttaacatcagtacg

SEQ ID NO: 344 - DNA, 27 bp, Artificial Sequence
  Synthetic Oligonucleotide
  misc_feature (4)..(4): n is a, c, g, or t
attncccttcagctaaaataaaggagg

SEQ ID NO: 345 - DNA, 27 bp, Artificial Sequence
  Synthetic Oligonucleotide
  misc_feature (4)..(4): n is a, c, g, or t
attnggctcagcaggcacctgcctcag

SEQ ID NO: 346 - DNA, 27 bp, Artificial Sequence
  Synthetic Oligonucleotide
  misc_feature (4)..(4): n is a, c, g, or t
attngggactggagttgcttcatgtac

SEQ ID NO: 347 - DNA, 27 bp, Artificial Sequence
  Synthetic Oligonucleotide
  misc_feature (4)..(4): n is a, c, g, or t
attntctccatgaaaaatactggggtc

SEQ ID NO: 348 - DNA, 27 bp, Artificial Sequence
  Synthetic Oligonucleotide
  misc_feature (4)..(4): n is a, c, g, or t
attntctccataaaaaatactagaaaa

SEQ ID NO: 349 - DNA, 27 bp, Artificial Sequence
  Synthetic Oligonucleotide
  misc_feature (4)..(4): n is a, c, g, or t
attnttcatggagaaaatattcagaat

SEQ ID NO: 350 - DNA, 27 bp, Artificial Sequence
  Synthetic Oligonucleotide
  misc_feature (4)..(4): n is a, c, g, or t
attnttcatgaagaaaatattcagaaa

SEQ ID NO: 351 - DNA, 27 bp, Artificial Sequence
  Synthetic Oligonucleotide
  misc_feature (4)..(4): n is a, c, g, or t
attngcagctacaggcagagacaaagg

SEQ ID NO: 352 - DNA, 27 bp, Artificial Sequence
  Synthetic Oligonucleotide
  misc_feature (4)..(4): n is a, c, g, or t
attncctggaaaccatccaggccttgt

SEQ ID NO: 353 - DNA, 27 bp, Artificial Sequence
  Synthetic Oligonucleotide
  misc_feature (4)..(4): n is a, c, g, or t
attnggtcagctgttaacatcagtacg

SEQ ID NO: 354 - DNA, 27 bp, Artificial Sequence
  Synthetic Oligonucleotide
  misc_feature (4)..(4): n is a, c, g, or t
attntcttcacggaaacagggttcctt

SEQ ID NO: 355 - DNA, 27 bp, Artificial Sequence
  Synthetic Oligonucleotide
  misc_feature (4)..(4): n is a, c, g, or t
attntcttcgcggaagcagggttccgg

SEQ ID NO: 356 - DNA, 27 bp, Artificial Sequence
  Synthetic Oligonucleotide
  misc_feature (4)..(4): n is a, c, g, or t
tttntggttgcccaccctagtcattgg

SEQ ID NO: 357 - DNA, 27 bp, Artificial Sequence
  Synthetic Oligonucleotide
  misc_feature (4)..(4): n is a, c, g, or t
tttngatggcgacttcaggcacaggat

SEQ ID NO: 358 - DNA, 27 bp, Artificial Sequence
  Synthetic Oligonucleotide
  misc_feature (4)..(4): n is a, c, g, or t
attntgcagagcaaataccagagataa

SEQ ID NO: 359 - DNA, 27 bp, Artificial Sequence
  Synthetic Oligonucleotide
  misc_feature (4)..(4): n is a, c, g, or t
attntgtacataaaatatcaaagtaca

SEQ ID NO: 360 - DNA, 27 bp, Artificial Sequence
  Synthetic Oligonucleotide
  misc_feature (4)..(4): n is a, c, g, or t
tttncctcactcctgctcggtgaattt

SEQ ID NO: 361 - DNA, 27 bp, Artificial Sequence
  Synthetic Oligonucleotide
  misc_feature (4)..(4): n is a, c, g, or t
attntcttcacggaaacagggttcctt

SEQ ID NO: 362 - DNA, 27 bp, Artificial Sequence
  Synthetic Oligonucleotide
  misc_feature (4)..(4): n is a, c, g, or t
attntcttcgcggaagcagggttccgg

SEQ ID NO: 363 - DNA, 27 bp, Artificial Sequence
  Synthetic Oligonucleotide
  misc_feature (4)..(4): n is a, c, g, or t
tttntggttgcccaccctagtcattgg

SEQ ID NO: 364 - DNA, 27 bp, Artificial Sequence
  Synthetic Oligonucleotide
  misc_feature (4)..(4): n is a, c, g, or t
tttngatggcgacttcaggcacaggat

SEQ ID NO: 365 - DNA, 27 bp, Artificial Sequence
  Synthetic Oligonucleotide
  misc_feature (4)..(4): n is a, c, g, or t
attntgcagagcaaataccagagataa

SEQ ID NO: 366 - DNA, 27 bp, Artificial Sequence
  Synthetic Oligonucleotide
  misc_feature (4)..(4): n is a, c, g, or t
attnctgacctcccaaacagctacata

SEQ ID NO: 367 - DNA, 27 bp, Artificial Sequence
  Synthetic Oligonucleotide
  misc_feature (4)..(4): n is a, c, g, or t
attntcagagggacacactgtggcccc

SEQ ID NO: 368 - DNA, 44 bp, Artificial Sequence
  Synthetic Oligonucleotide
tctctcattctgcagagcaaataccagagataagagagtaggct

SEQ ID NO: 369 - DNA, 23 bp, Artificial Sequence
  Synthetic Oligonucleotide
tctccatgaaaaatactggggtc

SEQ ID NO: 370 - DNA, 23 bp, Artificial Sequence
  Synthetic Oligonucleotide
cctggaaaccatccaggccttgt

SEQ ID NO: 371 - DNA, 23 bp, Artificial Sequence
  Synthetic Oligonucleotide
gcagctacaggcagagacaaagg

SEQ ID NO: 372 - DNA, 23 bp, Artificial Sequence
  Synthetic Oligonucleotide
tgcagagcaaataccagagataa

SEQ ID NO: 373 - DNA, 23 bp, Artificial Sequence
  Synthetic Oligonucleotide
ggtcagctgttaacatcagtacg

SEQ ID NO: 374 - DNA, 23 bp, Artificial Sequence
  Synthetic Oligonucleotide
tcagagggacacactgtggcccc

SEQ ID NO: 375 - DNA, 44 bp, Artificial Sequence; identical to SEQ ID NO: 368
  Synthetic Oligonucleotide

SEQ ID NO: 376 - DNA, 44 bp, Artificial Sequence; identical to SEQ ID NO: 368
  Synthetic Oligonucleotide

SEQ ID NO: 377 - DNA, 44 bp, Artificial Sequence
  Synthetic Oligonucleotide
tggcacattgtcagagggacacactgtggcccctgtgcccagcc

SEQ ID NO: 378 - DNA, 44 bp, Artificial Sequence
  Synthetic Oligonucleotide
gctgtcatttcctggaaaccatccaggccttgtagcctgccctc

SEQ ID NO: 379 - protein, 1147 aa, Alicyclobacillus kakegawensis
MAVKSIKVKLRLSECPDILAGMWQLHRATNAGVRYYTEWVSLMRQEILYSRGPDGGQQCYMTAEDCQRELLRRLRNRQLHNGRQDQPGTDADLLAISRRLYEILVLQSIGKRGDAQQIASSFLSPLVDPNSKGGRGEAKSGRKPAWQKMRDQGDPRWVAAREKYEQRKAVDPSKEILNSLDALGLRPLFAVFTETYRSGVDWKPLGKSQGVRTWDRDMFQQALERLMSWESWNRRVGEEYARLFQQKMKFEQEHFAEQSHLVKLARALEADMRAASQGFEAKRGTAHQITRRALRGADRVFEIWKSIPEEALFSQYDEVIRQVQAEKRRDFGSHDLFAKLAEPKYQPLWRADETFLTRYALYNGVLRDLEKARQFATFTLPDACVNPIWTRFESSQGSNLHKYEFLFDHLGPGRHAVRFQRLLVVESEGAKERDSVVVPVAPSGQLDKLVLREEEKSSVALHLHDTARPDGFMAEWAGAKLQYERSTLARKARRDKQGMRSWRRQPSMLMSAAQMLEDAKQAGDVYLNISVRVKSPSEVRGQRRPPYAALFRIDDKQRRVTVNYNKLSAYLEEHPDKQIPGAPGLLSGLRVMSVDLGLRTSASISVFRVAKKEEVEALGDGRPPHYYPIHGTDDLVAVHERSHLIQMPGETETKQLRKLREERQAVLRPLFAQLALLRLLVRCGAADERIRTRSWQRLTKQGREFTKRLTPSWREALELELTRLEAYCGRVPDDEWSRIVDRTVIALWRRMGKQVRDWRKQVKSGAKVKVKGYQLDVVGGNSLAQIDYLEQQYKFLRRWSFFARASGLVVRADRESHFAVALRQHIENAKRDRLKKLADRILMEALGYVYEASGPREGQWTAQHPPCQLIILEELSAYRFSDDRPPSENSKLMAWGHRGILEELVNQAQVHDVLVGTVYAAFSSRFDARTGAPGVRCRRVPARFVGATVDDSLPLWLTEFLDKHRLDKNLLRPDDVIPTGEGEFLVSPCGEEAARVRQVHADINAAQNLQRRLWQNFDITELRLRCDVKMGGEGTVLVPRVNNARAKQLFGKKVLVSQDGVTFFERSQTGGKPHSEKQTDLTDKELELIAEADEARAKSVVLFRDPSGHIGKGHWIRQREFWSLVKQRIESHTAERIRVRGVGSSLD

SEQ ID NO: 380 - protein, 1112 aa, Bacillus species
MAIRSIKLKMKTNSGTDSIYLRKALWRTHQLINEGIAYYMNLLTLYRQEAIGDKTKEAYQAELINIIRNQQRNNGSSEEHGSDQEILALLRQLYELIIPSSIGESGDANQLGNKFLYPLVDPNSQSGKGTSNAGRKPRWKRLKEEGNPDWELEKKKDEERKAKDPTVKIFDNLNKYGLLPLFPLFTNIQKDIEWLPLGKRQSVRKWDKDMFIQAIERLLSWESWNRRVADEYKQLKEKTESYYKEHLTGGEEWIEKIRKFEKERNMELEKNAFAPNDGYFITSRQIRGWDRVYEKWSKLPESASPEELWKVVAEQQNKMSEGFGDPKVFSFLANRENRDIWRGHSERIYHIAAYNGLQKKLSRTKEQATFTLPDAIEHPLWIRYESPGGTNLNLFKLEEKQKKNYYVTLSKIIWPSEEKWIEKENIEIPLAPSIQFNRQIKLKQHVKGKQEISFSDYSSRISLDGVLGGSRIQFNRKYIKNHKELLGEGDIGPVFFNLVVDVAPLQETRNGRLQSPIGKALKVISSDFSKVIDYKPKELMDWMNTGSASNSFGVASLLEGMRVMSIDMGQRTSASVSIFEVVKELPKDQEQKLFYSINDTELFAIHKRSFLLNLPGEVVTKNNKQQRQERRKKRQFVRSQIRMLANVLRLETKKTPDERKKAIHKLMEIVQSYDSWTASQKEVWEKELNLLTNMAAFNDEIWKESLVELHHRIEPYVGQIVSKWRKGLSEGRKNLAGISMWNIDELEDTRRLLISWSKRSRTPGEANRIETDEPFGSSLLQHIQNVKDDRLKQMANLIIMTALGFKYDKEEKDRYKRWKETYPACQIILFENLNRYLFNLDRSRRENSRLMKWAHRSIPRTVSMQGEMFGLQVGDVRSEYSSRFHAKTGAPGIRCHALTEEDLKAGSNTLKRLIEDGFINESELAYLKKGDIIPSQGGELFVTLSKRYKKDSDNNELTVIHADINAAQNLQKRFWQQNSEVYRVPCQLARMGEDKLYIPKSQTETIKKYFGKGSFVKNNTEQEVYKWEKSEKMKIKTDTTFDLQDLDGFEDISKTIELAQEQQKKYLTMFRDPSGYFFNNETWRPQKEYWSIVNNIIKSCLKKKILSNKVEL

SEQ ID NO: 381 - protein, 1489 aa, Desulfatirhabdium butyrativorans
MPLSNNPPVTQRAYTLRLRGADPSDLSWREALWHTHEAVNKGAKVFGDWLLTLRGGLDHTLADTKVKGGKGKPDRDPTPEERKARRILLALSWLSVESKLGAPSSYIVASGDEPAKDRNDNVVSALEEILQSRKVAKSEIDDWKRDCSASLSAAIRDDAVWVNRSKVFDEAVKSVGSSLTREEAWDMLERFFGSRDAYLTPMKDPEDKSSETEQEDKAKDLVQKAGQWLSSRYGTSEGADFCRMSDIYGKIAAWADNASQGGSSTVDDLVSELRQHFDTKESKATNGLDWIIGLSSYTGHTPNPVHELLRQNTSLNKSHLDDLKKKANTRAESCKSKIGSKGQRPYSDAILNDVESVCGFTYRVDKDGQPVSVADYSKYDVDYKWGTARHYIFAVMLDHAARRISLAHKWIKRAEAERHKFEEDAKRIANVPARAREWLDSFCKERSVTSGAVEPYRIRRRAVDGWKEVVAAWSKSDCKSTEDRIAAARALQDDSEIDKFGDIQLFEALAEDDALCVWHKDGEATNEPDFQPLIDYSLAIEAEFKKRQFKVPAYRHPDELLHPVFCDFGKSRWKINYDVHKNVQAPFYRGLCLTLWTGSEIKPVPLCWQSKRLTRDLALGNNHRNDAASAVTRADRLGRAASNVTKSDMVNITGLFEQADWNGRLQAPRQQLEAIAVVRDNPRLSEQERNLRMCGMIEHIRWLVTFSVKLQPQGPWCAYAEQHGLNTNPQYWPHADTNRDRKVHARLILPRLPGLRVLSVDLGHRYAAACAVWEAVNTETVKEACQNVGRDMPKEHDLYLHIKVKKQGIGKQTEVDKTTIYRRIGADTLPDGRPHPAPWARLDRQFLIKLQGEEKDAREASNEEIWALHQMECKLDRTKPLIDRLIASGWGLLKRQMARLDALKELGWIPAPDSSENLSREDGEAKDYRESLAVDDLMFSAVRTLRLALQRHGNRARIAYYLISEVKIRPGGIQEKLDENGRIDLLQDALALWHELFSSPGWRDEAAKQLWDSRIATLAGYKAPEENGDNVSDVAYRKKQQVYREQLRNVAKTLSGDVITCKELSDAWKERWEDEDQRWKKLLRWFKDWVLPSGTQANNATIRNVGGLSLSRLATITEFRRKVQVGFFTRLRPDGTRHEIGEQFGQKTLDALELLREQRVKQLASRIAEAALGIGSEGGKGWDGGKRPRQRINDSRFAPCHAVVIENLANYRPDETRTRLENRRLMTWSASKVHKYLSEACQLNGLYLCTVSAWYTSRQDSRTGAPGIRCQDVSVREFMQSPFWRKQVKQAEAKHDENKGDARERFLCELNKTWKAKTPAEWKKAGFVRIPLRGGEIFVSADSKSPSAKGIHADLNAAANIGLRALTDPDWPGKWWYVPCDPVSFESKMDYVKGCAAVKVGQPLRQPAQTNADGAASKIRKGKKNRTAGTSKEKVYLWRDISAFPLESNEIGEWKETSAYQNDVQYRVIRMLKEHIKSLDNRTGDNVEG

SEQ ID NO: 382 - protein, 1194 aa, Desulfonatronum thiodismutans
MVLGRKDDTAELRRALWTTHEHVNLAVAEVERVLLRCRGRSYWTLDRRGDPVHVPESQVAEDALAMAREAQRRNGWPVVGEDEEILLALRYLYEQIVPSCLLDDLGKPLKGDAQKIGTNYAGPLFDSDTCRRDEGKDVACCGPFHEVAGKYLGALPEWATPISKQEFDGKDASHLRFKATGGDDAFFRVSIEKANAWYEDPANQDALKNKAYNKDDWKKEKDKGISSWAVKYIQKQLQLGQDPRTEVRRKLWLELGLLPLFIPVFDKTMVGNLWNRLAVRLALAHLLSWESWNHRAVQDQALARAKRDELAALFLGMEDGFAGLREYELRRNESIKQHAFEPVDRPYVVSGRALRSWTRVREEWLRHGDTQESRKNICNRLQDRLRGKFGDPDVFHWLAEDGQEALWKERDCVTSFSLLNDADGLLEKRKGYALMTFADARLHPRWAMYEAPGGSNLRTYQIRKTENGLWADVVLLSPRNESAAVEEKTFNVRLAPSGQLSNVSFDQIQKGSKMVGRCRYQSANQQFEGLLGGAEILFDRKRIANEQHGATDLASKPGHVWFKLTLDVRPQAPQGWLDGKGRPALPPEAKHFKTALSNKSKFADQVRPGLRVLSVDLGVRSFAACSVFELVRGGPDQGTYFPAADGRTVDDPEKLWAKHERSFKITLPGENPSRKEEIARRAAMEELRSLNGDIRRLKAILRLSVLQEDDPRTEHLRLFMEAIVDDPAKSALNAELFKGFGDDRFRSTPDLWKQHCHFFHDKAEKVVAERFSRWRTETRPKSSSWQDWRERRGYAGGKSYWAVTYLEAVRGLILRWNMRGRTYGEVNRQDKKQFGTVASALLHHINQLKEDRIKTGADMIIQAARGFVPRKNGAGWVQVHEPCRLILFEDLARYRFRTDRSRRENSRLMRWSHREIVNEVGMQGELYGLHVDTTEAGFSSRYLASSGAPGVRCRHLVEEDFHDGLPGMHLVGELDWLLPKDKDRTANEARRLLGGMVRPGMLVPWDGGELFATLNAASQLHVIHADINAAQNLQRRFWGRCGEAIRIVCNQLSVDGSTRYEMAKAPKARLLGALQQLKNGDAPFHLTSIPNSQKPENSYVMTPTNAGKKYRAGPGEKSSGEEDELALDIVEQAEELAQGRKTFFRDPSGVFFAPDRWLPSEIYWSRIRRRIWQVTLERNSSGRQERAEMDEMPY

SEQ ID NO: 383 - protein, 1326 aa, Unknown
  Lentisphaeria bacterium
MAVELNRIYQGRVNHVYIFDENQNQVSVDNGDDLLFVHHELYQDAINYYLVALAAMALDSKDSLFGKFKMQIRAVWNDFYRNGQLRPGLKHSLIRSLGHAAELNTSNGADIAMNLILEDGGIPSEILNAALEHLAEKCTGDVSQLGKTFFPRFCDTAYHGNWDVDAKSFSEKKGRQRLVDALYSLHPVQAVQELAPEIEIGWGGVKTQTGKFFTGDEAKASLKKAISYFLQDTGKNSPELQEYFSVAGKQPLEQYLGKIDTFPEISFGRISSHQNINISNAMWILKFFPDQYSVDLIKNLIPNKKYEIGIAPQWGDDPVKLSRGKRGYTFRAFTDLAMWEKNWKVFDRAAFSDALKTINQFRNKTQERNDQLKRYCAALNWMDGESSDKKPPVEPADADAVDEAATSVLPILAGDKRWNALLQLQKELGICNDFTENELMDYGLSLRTIRGYQKLRSMMLEKEEKMRAKTADDEEISQALQEIIIKFQSSHRDTIGSVSLFLKLAEPKYFCVWHDADKNQNFASVDMVADAVRYYSYQEEKARLEEPIQITPADARYSRRVSDLYALVYKNAKECKTGYGLRPDGNFVFEIAQKNAKGYAPAKVVLAFSAPRLKRDGLIDKEFSAYYPPVLQAFLREEEAPKQSFKTTAVILMPDWDKNGKRRILLNFPIKLDVSAIHQKTDHRFENQFYFANNTNTCLLWPSYQYKKPVTWYQGKKPFDVVAVDLGQRSAGAVSRITVSTEKREHSVAIGEAGGTQWYAYRKFSGLLRLPGEDATVIRDGQRTEELSGNAGRLSTEEETVQACVLCKMLIGDATLLGGSDEKTIRSFPKQNDKLLIAFRRATGRMKQLQRWLWMLNENGLCDKAKTEISNSDWLVNKNIDNVLKEEKQHREMLPAILLQIADRVLPLRGRKWDWVLNPQSNSFVLQQTAHGSGDPHKKICGQRGLSFARIEQLESLRMRCQALNRILMRKTGEKPATLAEMRNNPIPDCCPDILMRLDAMKEQRINQTANLILAQALGLRHCLHSESATKRKENGMHGEYEKIPGVEPAAFVVLEDLSRYRFSQDRSSYENSRLMKWSHRKILEKLALLCEVFNVPILQVGAAYSSKFSANAIPGFRAEECSIDQLSFYPWRELKDSREKALVEQIRKIGHRLLTFDAKATIIMPRNGGPVFIPFVPSDSKDTLIQADINASFNIGLRGVADATNLLCNNRVSCDRKKDCWQVKRSSNFSKMVYPEKLSLSFDPIKKQEGAGGNFFVLGCSERILTGTSEKSPVFTSSEMAKKYPNLMFGSALWRNEILKLERCCKINQSRLDKFIAKKEVQNEL

SEQ ID NO: 384 - protein, 1090 aa, Laceyella sediminis
MSIRSFKLKIKTKSGVNAEELRRGLWRTHQLINDGIAYYMNWLVLLRQEDLFIRNEETNEIEKRSKEEIQGELLERVHKQQQRNQWSGEVDDQTLLQTLRHLYEEIVPSVIGKSGNASLKARFFLGPLVDPNNKTTKDVSKSGPTPKWKKMKDAGDPNWVQEYEKYMAERQTLVRLEEMGLIPLFPMYTDEVGDIHWLPQASGYTRTWDRDMFQQAIERLLSWESWNRRVRERRAQFEKKTHDFASRFSESDVQWMNKLREYEAQQEKSLEENAFAPNEPYALTKKALRGWERVYHSWMRLDSAASEEAYWQEVATCQTAMRGEFGDPAIYQFLAQKENHDIWRGYPERVIDFAELNHLQRELRRAKEDATFTLPDSVDHPLWVRYEAPGGTNIHGYDLVQDTKRNLTLILDKFILPDENGSWHEVKKVPFSLAKSKQFHRQVWLQEEQKQKKREVVFYDYSTNLPHLGTLAGAKLQWDRNFLNKRTQQQIEETGEIGKVFFNISVDVRPAVEVKNGRLQNGLGKALTVLTHPDGTKIVTGWKAEQLEKWVGESGRVSSLGLDSLSEGLRVMSIDLGQRTSATVSVFEITKEAPDNPYKFFYQLEGTELFAVHQRSFLLALPGENPPQKIKQMREIRWKERNRIKQQVDQLSAILRLHKKVNEDERIQAIDKLLQKVASWQLNEEIATAWNQALSQLYSKAKENDLQWNQAIKNAHHQLEPVVGKQISLWRKDLSTGRQGIAGLSLWSIEELEATKKLLTRWSKRSREPGVVKRIERFETFAKQIQHHINQVKENRLKQLANLIVMTALGYKYDQEQKKWIEVYPACQVVLFENLRSYRFSYERSRRENKKLMEWSHRSIPKLVQMQGELFGLQVADVYAAYSSRYHGRTGAPGIRCHALTEADLRNETNIIHELIEAGFIKEEHRPYLQQGDLVPWSGGELFATLQKPYDNPRILTLHADINAAQNIQKRFWHPSMWFRVNCESVMEGEIVTYVPKNKTVHKKQGKTFRFVKVEGSDVYEWAKWSKNRNKNTFSSITERKPPSSMILFRDPSGTFFKEQEWVEQKTFWGKVQSMIQAYMKKTIVQRMEE

SEQ ID NO: 385 - protein, 1041 aa, Methylobacterium nodulans
MYEAIVLADDANAQLANAFLGPLTDPNSAGFLEAFNKVDRPAPSWLDQVPASDPIDPAVLAEANAWLDTDAGRAWLVDTGAPPRWRSLAAKQDPIWPREFARKLGELRKEAASGTSAIIKALKRDFGVLPLFQPSLAPRILGSRSSLTPWDRLAFRLAVGHLLSWESWCTRARDEHTARVQRLEQFSSAHLKGDLATKVSTLREYERARKEQIAQLGLPMGERDFLITVRMTRGWDDLREKWRRSGDKGQEALHAIIATEQTRKRGRFGDPDLFRWLARPENHHVWADGHADAVGVLARVNAMERLVERSRDTALMTLPDPVAHPRSAQWEAEGGSNLRNYQLEAVGGELQITLPLLKAADDGRCIDTPLSFSLAPSDQLQGVVLTKQDKQQKITYCTNMNEVFEAKLGSADLLLNWDHLRGRIRDRVDAGDIGSAFLKLALDVAHVLPDGVDDQLARAAFHFQSAKGAKSKHADSVQAGLRVLSIDLGVRSFATCSVFELKDTAPTTGVAFPLAEFRLWAVHERSFTLELPGENVGAAGQQWRAQADAELRQLRGGLNRHRQLLRAATVQKGERDAYLTDLREAWSAKELWPFEASLLSELERCSTVADPLWQDTCKRAARLYRTEFGAVVSEWRSRTRSREDRKYAGKSMWSVQHLTDVRRFLQSWSLAGRASGDIRRLDRERGGVFAKDLLDHIDALKDDRLKTGADLIVQAARGFQRNEFGYWVQKHAPCHVILFEDLSRYRMRTDRPRRENSQLMQWAHRGVPDMVGMQGEIYGIQDRRDPDSARKHARQPLAAFCLDTPAAFSSRYHASTMTPGIRCHPLRKREFEDQGFLELLKRENEGLDLNGYKPGDLVPLPGGEVFVCLNANGLSRIHADINAAQNLQRRFWTQHGDAFRLPCGKSAVQGQIRWAPLSMGKRQAGALGGFGYLEPTGHDSGSCQWRKTTEAEWRRLSGAQKDRDEAAAAEDEELQGLEEELLERSGERVVFFRDPSGVVLPTDLWFPSAAFWSIVRAKTVGRLRSHLDAQAEASYAVAAGL

SEQ ID NO: 386 - protein, 1388 aa, Unknown
  Opitutaceae bacterium
MSLNRIYQGRVAAVETGTALAKGNVEWMPAAGGDEVLWQHHELFQAAINYYLVALLALADKNNPVLGPLISQMDNPQSPYHVWGSFRRQGRQRTGLSQAVAPYITPGNNAPTLDEVFRSILAGNPTDRATLDAALMQLLKACDGAGAIQQEGRSYWPKFCDPDSTANFAGDPAMLRREQHRLLLPQVLHDPAITHDSPALGSFDTYSIATPDTRTPQLTGPKARARLEQAITLWRVRLPESAADFDRLASSLKKIPDDDSRLNLQGYVGSSAKGEVQARLFALLLFRHLERSSFTLGLLRSATPPPKNAETPPPAGVPLPAASAADPVRIARGKRSFVFRAFTSLPCWHGGDNIHPTWKSFDIAAFKYALTVINQIEEKTKERQKECAELETDFDYMHGRLAKIPVKYTTGEAEPPPILANDLRIPLLRELLQNIKVDTALTDGEAVSYGLQRRTIRGFRELRRIWRGHAPAGTVFSSELKEKLAGELRQFQTDNSTTIGSVQLFNELIQNPKYWPIWQAPDVETARQWADAGFADDPLAALVQEAELQEDIDALKAPVKLTPADPEYSRRQYDFNAVSKFGAGSRSANRHEPGQTERGHNTFTTEIAARNAADGNRWRATHVRIHYSAPRLLRDGLRRPDTDGNEALEAVPWLQPMMEALAPLPTLPQDLTGMPVFLMPDVTLSGERRILLNLPVTLEPAALVEQLGNAGRWQNQFFGSREDPFALRWPADGAVKTAKGKTHIPWHQDRDHFTVLGVDLGTRDAGALALLNVTAQKPAKPVHRIIGEADGRTWYASLADARMIRLPGEDARLFVRGKLVQEPYGERGRNASLLEWEDARNIILRLGQNPDELLGADPRRHSYPEINDKLLVALRRAQARLARLQNRSWRLRDLAESDKALDEIHAERAGEKPSPLPPLARDDAIKSTDEALLSQRDIIRRSFVQIANLILPLRGRRWEWRPHVEVPDCHILAQSDPGTDDTKRLVAGQRGISHERIEQIEELRRRCQSLNRALRHKPGERPVLGRPAKGEEIADPCPALLEKINRLRDQRVDQTAHAILAAALGVRLRAPSKDRAERRHRDIHGEYERFRAPADFVVIENLSRYLSSQDRARSENTRLMQWCHRQIVQKLRQLCETYGIPVLAVPAAYSSRFSSRDGSAGFRAVHLTPDHRHRMPWSRILARLKAHEEDGKRLEKTVLDEARAVRGLFDRLDRFNAGHVPGKPWRTLLAPLPGGPVFVPLGDATPMQADLNAAINIALRGIAAPDRHDIHHRLRAENKKRILSLRLGTQREKARWPGGAPAVTLSTPNNGASPEDSDALPERVSNLFVDIAGVANFERVTIEGVSQKFATGRGLWASVKQRAWNRVARLNETVTDNNRNEEEDDIPM

SEQ ID NO: 387 - protein, 1108 aa, Bacillus species
MAIRSIKLKLKTHTGPEAQNLRKGIWRTHRLLNEGVAYYMKMLLLFRQESTGERPKEELQEELICHIREQQQRNQADKNTQALPLDKALEALRQLYELLVPSSVGQSGDAQIISRKFLSPLVDPNSEGGKGTSKAGAKPTWQKKKEANDPTWEQDYEKWKKRREEDPTASVITTLEEYGIRPIFPLYTNTVTDIAWLPLQSNQFVRTWDRDMLQQAIERLLSWESWNKRVQEEYAKLKEKMAQLNEQLEGGQEWISLLEQYEENRERELRENMTAANDKYRITKRQMKGWNELYELWSTFPASASHEQYKEALKRVQQRLRGRFGDAHFFQYLMEEKNRLIWKGNPQRIHYFVARNELTKRLEEAKQSATMTLPNARKHPLWVRFDARGGNLQDYYLTAEADKPRSRRFVTFSQLIWPSESGWMEKKDVEVELALSRQFYQQVKLLKNDKGKQKIEFKDKGSGSTFNGHLGGAKLQLERGDLEKEEKNFEDGEIGSVYLNVVIDFEPLQEVKNGRVQAPYGQVLQLIRRPNEFPKVTTYKSEQLVEWIKASPQHSAGVESLASGFRVMSIDLGLRAAAATSIFSVEESSDKNAADFSYWIEGTPLVAVHQRSYMLRLPGEQVEKQVMEKRDERFQLHQRVKFQIRVLAQIMRMANKQYGDRWDELDSLKQAVEQKKSPLDQTDRTFWEGIVCDLTKVLPRNEADWEQAVVQIHRKAEEYVGKAVQAWRKRFAADERKGIAGLSMWNIEELEGLRKLLISWSRRTRNPQEVNRFERGHTSHQRLLTHIQNVKEDRLKQLSHAIVMTALGYVYDERKQEWCAEYPACQVILFENLSQYRSNLDRSTKENSTLMKWAHRSIPKYVHMQAEPYGIQIGDVRAEYSSRFYAKTGTPGIRCKKVRGQDLQGRRFENLQKRLVNEQFLTEEQVKQLRPGDIVPDDSGELFMTLTDGSGSKEVVFLQADINAAHNLQKRFWQRYNELFKVSCRVIVRDEEEYLVPKTKSVQAKLGKGLFVKKSDTAWKDVYVWDSQAKLKGKTTFTEESESPEQLEDFQEIIEEAEEAKGTYRTLFRDPSGVFFPESVWYPQKDFWGEVKRKLYGKLRERFLTKAR

SEQ ID NO: 388 - protein, 658 aa, Methylobacterium nodulans
MLTKQDKQQKITYCTNMNEVFEAKLGSADLLLNWDHLRGRIRDRVDAGDIGSAFLKLALDVAHVLPDGVDDQLARAAFHFQSAKGAKSKHADSVQAGLRVLSIDLGVRSFATCSVFELKDTAPTTGVAFPLAEFRLWAVHERSFTLELPGENVGAAGQQWRAQADAELRQLRGGLNRHRQLLRAATVQKGERDAYLTDLREAWSAKELWPFEASLLSELERCSTVADPLWQDTCKRAARLYRTEFGAVVSEWRSRTRSREDRKYAGKSMWSVQHLTDVRRFLQSWSLAGRASGDIRRLDRERGGVFAKDLLDHIDALKDDRLKTGADLIVQAARGFQRNEFGYWVQKHAPCHVILFEDLSRYRMRTDRPRRENSQLMQWAHRGVPDMVGMQGEIYGIQDRRDPDSARKHARQPLAAFCLDTPAAFSSRYHASTMTPGIRCHPLRKREFEDQGFLELLKRENEGLDLNGYKPGDLVPLPGGEVFVCLNANGLSRIHADINAAQNLQRRFWTQHGDAFRLPCGKSAVQGQIRWAPLSMGKRQAGALGGFGYLEPTGHDSGSCQWRKTTEAEWRRLSGAQKDRDEAAAAEDEELQGLEEELLERSGERVVFFRDPSGVVLPTDLWFPSAAFWSIVRAKTVGRLRSHLDAQAEASYAVAAGL

SEQ ID NO: 389 - protein, 1147 aa, Alicyclobacillus kakegawensis; identical to SEQ ID NO: 379

SEQ ID NO: 390 - protein, 1112 aa, Bacillus species; identical to SEQ ID NO: 380

SEQ ID NO: 391 - protein, 1326 aa, Unknown; identical to SEQ ID NO: 383
  Lentisphaeria bacterium

SEQ ID NO: 392 - protein, 1090 aa, Laceyella sediminis; identical to SEQ ID NO: 384

SEQ ID NO: 393 - protein, 15 aa, Artificial Sequence
  Synthetic Peptide
GGGGSGGGGSGGGGS

SEQ ID NO: 394 - protein, 30 aa, Artificial Sequence
  Synthetic Peptide
GGGGSGGGGSGGGGSGGGGSGGGGSGGGGS

SEQ ID NO: 395 - protein, 45 aa, Artificial Sequence
  Synthetic Peptide
GGGGSGGGGSGGGGSGGGGSGGGGSGGGGSGGGGSGGGGSGGGGS

SEQ ID NO: 396 - protein, 60 aa, Artificial Sequence
  Synthetic Peptide
GGGGSGGGGSGGGGSGGGGSGGGGSGGGGSGGGGSGGGGSGGGGSGGGGSGGGGSGGGGS

SEQ ID NO: 397 - DNA, 12 bp, Artificial Sequence
  Synthetic Oligonucleotide
acttgtttaagt

SEQ ID NO: 398 - DNA, 12 bp, Artificial Sequence
  Synthetic Oligonucleotide
  misc_feature (1)..(4): n = any nucleotide that is complementary to nnnn at positions 9-12
  misc_feature (9)..(12): n = any nucleotide that is complementary to nnnn at positions 1-4
nnnngtttnnnn

SEQ ID NO: 399 - DNA, 16 bp, Artificial Sequence
  Synthetic Oligonucleotide
ggcaccgagtcggtgc

SEQ ID NO: 400 - DNA, 17 bp, Artificial Sequence
  Synthetic Oligonucleotide
  misc_feature (1)..(7): n = any nucleotide that is complementary to nnnnnnn at positions 11 to 17
  misc_feature (11)..(17): n = any nucleotide that is complementary to nnnnnnn at positions 1 to 7
nnnnnnnagtnnnnnnn

SEQ ID NO: 401 - RNA, 30 nt, Artificial Sequence
  Synthetic Oligonucleotide
  misc_feature (2)..(5): y = t/u or c
  misc_feature (8)..(20): n = any nucleotide
  misc_feature (8)..(8): n= bulge in a duplex
  misc_feature (21)..(23): n= bulge in a duplex
  misc_feature (23)..(23): n = any nucleotide
  misc_feature (26)..(29): r = g or a
gyyyyagnnnnnnnnnnnnnaanuurrrru

SEQ ID NO: 402 - protein, 4 aa, Artificial Sequence
  Synthetic Peptide
GGGS

SEQ ID NO: 403 - protein, 5 aa, Artificial Sequence
  Synthetic Peptide
GGGGS

SEQ ID NO: 404 - protein, 9 aa, Artificial Sequence
  Synthetic Peptide
GGSGGSGGS

SEQ ID NO: 405 - protein, 25 aa, Artificial Sequence
  Synthetic Peptide
GGGGSGGGGSGGGGSGGGGSGGGGS

SEQ ID NO: 406 - protein, 35 aa, Artificial Sequence
  Synthetic Peptide
GGGGSGGGGSGGGGSGGGGSGGGGSGGGGSGGGGS

SEQ ID NO: 407 - protein, 10 aa, Artificial Sequence
  Synthetic Peptide
GGGGSGGGGS

SEQ ID NO: 408 - protein, 20 aa, Artificial Sequence
  Synthetic Peptide
GGGGSGGGGSGGGGSGGGGS

SEQ ID NO: 409 - protein, 40 aa, Artificial Sequence
  Synthetic Peptide
GGGGSGGGGSGGGGSGGGGSGGGGSGGGGSGGGGSGGGGS

SEQ ID NO: 410 - protein, 50 aa, Artificial Sequence
  Synthetic Peptide
GGGGSGGGGSGGGGSGGGGSGGGGSGGGGSGGGGSGGGGSGGGGSGGGGS

SEQ ID NO: 411 - protein, 55 aa, Artificial Sequence
  Synthetic Peptide
GGGGSGGGGSGGGGSGGGGSGGGGSGGGGSGGGGSGGGGSGGGGSGGGGSGGGGS

SEQ ID NO: 412 - protein, 32 aa, Artificial Sequence
  Synthetic Peptide
LEPGEKPYKCPECGKSFSQSGALTRHQRTHTR

SEQ ID NO: 413 - protein, 20 aa, Artificial Sequence
  Synthetic Peptide
PKKKRKVEASSPKKRKVEAS

SEQ ID NO: 414 - DNA, 9 bp, Artificial Sequence
  Synthetic Oligonucleotide
ggtggtagt

SEQ ID NO: 415 - DNA, 27 bp, Artificial Sequence
  Synthetic Oligonucleotide
ggtggtagtggagggagcggcggttca

SEQ ID NO: 416 - DNA, 72 bp, Artificial Sequence
  Synthetic Oligonucleotide
ggtggaggaggctctggtggaggcggtagcggaggcggagggtcgggtggtagtggagggagcggcggttca

SEQ ID NO: 417 - DNA, 48 bp, Artificial Sequence
  Synthetic Oligonucleotide
tcgggatctgagacgcctgggacctcggaatcggctacgcccgaaagt

SEQ ID NO: 418 - DNA, 192 bp, Artificial Sequence
  Synthetic Oligonucleotide
gtggataacaaatttaacaaagaaatgtgggcggcgtgggaagaaattcgtaacctgccgaacctgaacggctggcagatgaccgcgtttattgcgagcctggtggatgatccgagccagagcgcgaacctgctggcggaagcgaaaaaactgaacgatgcgcaggcgccgaaaaccggcggtggttctggt

SEQ ID NO: 419 - DNA, 108 bp, Artificial Sequence
  Synthetic Oligonucleotide
ggtggttctgccggtggctccggttctggctccagcggtggcagctctggtgcgtccggcacgggtactgcgggtggcactggcagcggttccggtactggctctggc

SEQ ID NO: 420 - protein, 284 aa, Artificial Sequence
  Synthetic Peptide
GFGDVGALESLRGNADLAYILSMEPCGHCLIINNVNFCRESGLRTRTGSNIDCEKLRRRFSSLHFMVEVKGDLTAKKMVLALLELARQDHGALDCCVVVILSHGCQASHLQFPGAVYGTDGCPVSVEKIVNIFNGTSCPSLGGKPKLFFIQACGGEQKDHGFEVASTSPEDESPGSNPEPDATPFQEGLRTFDQLDAISSLPTPSDIFVSYSTFPGFVSWRDPKSGSWYVETLDDIFEQWAHSEDLQSLLLRVANAVSVKGIYKQMPGCFNFLRKKLFFKTSVD

SEQ ID NO: 421 - protein, 263 aa, Artificial Sequence
  Synthetic Peptide
SESQTLDKVYQMKSKPRGYCLIINNHNFAKAREKVPKLHSIRDRNGTHLDAGALTTTFEELHFEIKPHDDCTVEQIYEILKIYQLMDHSNMDCFICCILSHGDKGIIYGTDGQEAPIYELTSQFTGLKCPSLAGKPKVFFIQACQGDNYQKGIPVETDSEEQPYLEMDLSSPQTRYIPDEADFLLGMATVNNCVSYRNPAEGTWYIQSLCQSLRERCPRGDDILTILTEVNYEVSNKDDKKNMGKQMPQPTFTLRKKLVFPSD

SEQ ID NO: 422 - protein, 147 aa, Artificial Sequence
  Synthetic Peptide
SGISLDNSYKMDYPEMGLCIIINNKNFHKSTGMTSRSGTDVDAANLRETFRNLKYEVRNKNDLTREEIVELMRDVSKEDHSKRSSFVCVLLSHGEEGIIFGTNGPVDLKKITNFFRGDRCRSLTGKPKLFIIQACRGTELDCGIETD

SEQ ID NO: 423 - protein, 118 aa, Artificial Sequence
  Synthetic Peptide
GESLFKGPRDYNPISSTICHLTNESDGHTTSLYGIGFGPFIITNKHLFRRNNGTLLVQSLHGVFKVKNTTTLQQHLIDGRDMIIIRMPKDFPPFPQKLKFREPQREERICLVTTNFQT

SEQ ID NO: 424 - protein, 101 aa, Artificial Sequence
  Synthetic Peptide
KSMSSMVSDTSCTFPSSDGIFWKHWIQTKDGQCGSPLVSTRDGFIVGIHSASNFTNTNNYFTSVPKNFMELLTNQEAQQWVSGWRLNADSVLWGGHKVFMV

SEQ ID NO: 425 - protein, 939 aa, Artificial Sequence
  Synthetic Peptide
ATGGCAGATGATCAGGGCTGTATTGAAGAGCAGGGGGTTGAGGATTCAGCAAATGAAGATTCAGTGGAAAATCTCTACTTCCAGGCTAAGCCAGACCGGTCCTCGTTTGTACCGTCCCTCTTCAGTAAGAAGAAGAAAAATGTCACCATGCGATCCATCAAGACCACCCGGGACCGAGTGCCTACATATCAGTACAACATGAATTTTGAAAAGCTGGGCAAATGCATCATAATAAACAACAAGAACTTTGATAAAGTGACAGGTATGGGCGTTCGAAACGGAACAGACAAAGATGCCGAGGCGCTCTTCAAGTGCTTCCGAAGCCTGGGTTTTGACGTGATTGTCTATAATGACTGCTCTTGTGCCAAGATGCAAGATCTGCTTAAAAAAGCTTCTGAAGAGGACCATACAAATGCCGCCTGCTTCGCCTGCATCCTCTTAAGCCATGGAGAAGAAAATGTAATTTATGGGAAAGATGGTGTCACACCAATAAAGGATTTGACAGCCCACTTTAGGGGGGATAGATGCAAAACCCTTTTAGAGAAACCCAAACTCTTCTTCATTCAGGCTTGCCGAGGGACCGAGCTTGATGATGGCATCCAGGCCGAAAATCTCTACTTCCAGTCGGGGCCCATCAATGACACAGATGCTAATCCTCGATACAAGATCCCAGTGGAAGCTGACTTCCTCTTCGCCTATTCCACGGTTCCAGGCTATTACTCGTGGAGGAGCCCAGGAAGAGGCTCCTGGTTTGTGCAAGCCCTCTGCTCCATCCTGGAGGAGCACGGAAAAGACCTGGAAATCATGCAGATCCTCACCAGGGTGAATGACAGAGTTGCCAGGCACTTTGAGTCTCAGTCTGATGACCCACACTTCCATGAGAAGAAGCAGATCCCCTGTGTGGTCTCCATGCTCACCAAGGAACTCTACTTCAGTCAA

SEQ ID NO: 426 - protein, 861 aa, Artificial Sequence
  Synthetic Peptide
ATGGAGAACACTGAAAACTCAGTGGATTCAAAATCCATTAAAAATTTGGAACCAAAGATCATACATGGAAGCGAATCAATGGAAAATCTCTACTTCCAGTCTGGAATATCCCTGGACAACAGTTATAAAATGGATTATCCTGAGATGGGTTTATGTATAATAATTAATAATAAGAATTTTCATAAAAGCACTGGAATGACATCTCGGTCTGGTACAGATGTCGATGCAGCAAACCTCAGGGAAACATTCAGAAACTTGAAATATGAAGTCAGGAATAAAAATGATCTTACACGTGAAGAAATTGTGGAATTGATGCGTGATGTTTCTAAAGAAGATCACAGCAAAAGGAGCAGTTTTGTTTGTGTGCTTCTGAGCCATGGTGAAGAAGGAATAATTTTTGGAACAAATGGACCTGTTGACCTGAAAAAAATAACAAACTTTTTCAGAGGGGATCGTTGTAGAAGTCTAACTGGAAAACCCAAACTTTTCATTATTCAGGCCTGCCGTGGTACAGAACTGGACTGTGGCATTGAGACAGAAAATCTCTACTTCCAGAGTGGTGTTGATGATGACATGGCGTGTCATAAAATACCAGTGGAGGCCGACTTCTTGTATGCATACTCCACAGCACCTGGTTATTATTCTTGGCGAAATTCAAAGGATGGCTCCTGGTTCATCCAGTCGCTTTGTGCCATGCTGAAACAGTATGCCGACAAGCTTGAATTTATGCACATTCTTACCCGGGTTAACCGAAAGGTGGCAACAGAATTTGAGTCCTTTTCCTTTGACGCTACTTTTCATGCAAAGAAACAGATTCCATGTATTGTTTCCATGCTCACAAAAGAACTCTATTTTTATCAC

SEQ ID NO: 427 - protein, 164 aa, Artificial Sequence
  Synthetic Peptide
MAEGSVARQPDLLTCDDEPIHIPGAIQPHGLLLALAADMTIVAGSDNLPELTGLAIGALIGRSAADVFDSETHNRLTIALAEPGAAVGAPITVGFTMRKDAGFIGSWHRHDQLIFLELEPPQRGGSEVSALEKEVSALEKEVSALEKEVSALEKEVSALEKGGS

SEQ ID NO: 428 - protein, 239 aa, Artificial Sequence
  Synthetic Peptide
MGGSKVSALKEKVSALKEKVSALKEKVSALKEKVSALKEGGSPPQRDVAEPQAFFRRTNSAIRRLQAAETLESACAAAAQEVRKITGYDRVMIYRFASDFSGEVIAEDRCAEVESKLGLHYPASTVPAQARRLYTINPVRIIPDINYRPVPVTPYLNPVTGRPIDLSFAILRSVSPVHLEFMRNIGMHGTMSISILRGERLWGLIVCHHRTPYYVDLDGRQACELVAQVLARQIGVMEE

SEQ ID NO: 429 - protein, 154 aa, Artificial Sequence
  Synthetic Peptide
MVSKGEELFTGVVPILVELDGDVNGHKFSVSGEGEGDATYGKLTLKLICTTGKLPVPWPTLVTTLGYGLQCFARYPDHMKQHDFFKSAMPEGYVQERTIFFKDDGNYKTRAEVKFEGDTLVNRIELKGIDFKEDGNILGHKLEYNYNSHNVYIT

SEQ ID NO: 430 - protein, 85 aa, Artificial Sequence
  Synthetic Peptide
ADKQKNGIKANFKIRHNIEDGGVQLADHYQQNTPIGDGPVLLPDNHYLSYQSALSKDPNEKRDHMVLLEFVTAAGITLGMDELYK

SEQ ID NO: 431 - protein, 156 aa, Artificial Sequence
  Synthetic Peptide
SKGERLFRGKVPILVELKGDVNGHKFSVRGEGKGDATRGKLTLKFICTTGKLPVPWPTLVTTLTYGVQCFSRYPKHMKRHDFFKSAMPKGYVQERTISFKKDGKYKTRAEVKFEGRTLVNRIKLKGRDFKEKGNILGHKLRYNFNSHKVYITADKR

SEQ ID NO: 432 - protein, 81 aa, Artificial Sequence
  Synthetic Peptide
KNGIKAKFKIRHNVKDGSVQLADHYQQNTPIGRGPVLLPRNHYLSTRSKLSKDPKEKRDHMVLLEFVTAAGIKHGRDERYK

SEQ ID NO: 433 - protein, 229 aa, Rattus rattus [sequence omitted]

SEQ ID NO: 434 - protein, 236 aa, Homo sapiens
MTSEKGPSTGDPTLRRRIEPWEFDVFYDPRELRKEACLLYEIKWGMSRKIWRSSGKNTTNHVEVNFIKKFTSERDFHPSMSCSITWFLSWSPCWECSQAIREFLSRHPGVTLVIYVARLFWHMDQQNRQGLRDLVNSGVTIQIMRASEYYHCWRNFVNYPPGDEAHWPQYPPLWMMLYALELHCIILSLPPCLKISRRWQNHLTFFRLHLQNCHYQTIPPHILLATGLIHPSVAWR

SEQ ID NO: 435 - protein, 325 aa, Homo sapiens
MELKYHPEMRFFHWFSKWRKLHRDQEYEVTWYISWSPCTKCTRDMATFLAEDPKVTLTIFVARLYYFWDPDYQEALRSLCQKRDGPRATMKIMNYDEFQHCWSKFVYSQRELFEPWNNLPKYYILLHIMLGEILRHSMDPPTFTFNFNNEPWVRGRHETYLCYEVERMHNDTWVLLNQRRGFLCNQAPHKHGFLEGRHAELCFLDVIPFWKLDLDQDYRVTCFTSWSPCFSCAQEMAKFISKNKHVSLCIFTARIYDDQGRCQEGLRTLAEAGAKISIMTYSEFKHCWDTFVDHQGCPFQPWDGLDEHSQDLSGRLRAILQNQEN

SEQ ID NO: 436 - protein, 208 aa, Petromyzon marinus
MTDAEYVRIHEKLDIYTFKKQFFNNKKSVSHRCYVLFELKRRGERRACFWGYAVNKPQSGTERGIHAEIFSIRKVEEYLRDNPGQFTINWYSSWSPCADCAEKILEWYNQELRGNGHTLKIWACKLYYEKNARNQIGLWNLRDNGVGLNVMVSEHYQCCRKIFIQSSHNQLNENRWLEKTLKRAEKRRSELSIMIQVKILHTTKSPAV

SEQ ID NO: 437 - protein, 200 aa, Homo sapiens
MDSLLMNRRKFLYQFKNVRWAKGRRETYLCYVVKRRDSATSFSLDFGYLRNKNGCHVELLFLRYISDWDLDPGRCYRVTWFTSWSPCYDCARHVADFLRGNPYLSLRIFTARLYFCEDRKAEPEGLRRLHRAGVQIAIMTFKDYFYCWNTFVENHERTFKAWEGLHENSVRLSRQLRRILLPLYEVDDLRDAFRTLGLLD

SEQ ID NO: 438 - protein, 181 aa, Homo sapiens
MDSLLMNRRKFLYQFKNVRWAKGRRETYLCYVVKRRDSATSFSLDFGYLRNKNGCHVELLFLRYISDWDLDPGRCYRVTWFTSWSPCYDCARHVADFLRGNPNLSLRIFTARLYFCEDRKAEPEGLRRLHRAGVQIAIMTFKDYFYCWNTFVENHERTFKAWEGLHENSVRLSRQLRRILL

SEQ ID NO: 439 - RNA, 25 nt, Artificial Sequence
  Synthetic Oligonucleotide
gggaacaaagcugaaguacuuaccc

SEQ ID NO: 440 - DNA, 18 bp, Artificial Sequence
  Synthetic Oligonucleotide
gggtagggcgggttggga

SEQ ID NO: 441 - DNA, 25 bp, Artificial Sequence
  Synthetic Oligonucleotide
  misc_feature (25)..(25): 3' Thiol modification
ttataactattcctaaaaaaaaaaa

SEQ ID NO: 442 - DNA, 26 bp, Artificial Sequence
  Synthetic Oligonucleotide
  misc_feature (1)..(1): 5' Thiol modification
aaaaaaaaaactcccctaataacaat

SEQ ID NO: 443 - RNA, 45 nt, Artificial Sequence
  Synthetic Oligonucleotide
ggguaggaauaguuauaauuucccuuucccauuguuauuagggag

SEQ ID NO: 444 - RNA, 12 nt, Artificial Sequence
  Synthetic Oligonucleotide
  misc_feature (1)..(1): 5' biotin modification
  misc_feature (12)..(12): 3' quencher
  misc_feature (12)..(12): 3' quencher
  misc_feature (12)..(12): 3' quencher
  misc_feature (12)..(12): 3' quencher
ucucguacguuc

SEQ ID NO: 445 - RNA, 24 nt, Artificial Sequence
  Synthetic Oligonucleotide
  misc_feature (1)..(1): 5' biotin modification
  misc_feature (24)..(24): 3' quencher
  misc_feature (24)..(24): 3' quencher
  misc_feature (24)..(24): 3' quencher
ucucguacguucucucguacguuc

SEQ ID NO: 446 - DNA, 66 bp, Artificial Sequence
  Synthetic Oligonucleotide
tgtggttggtgtggttggttcatggtcatattggtttttttttttttttccaaccacagtctctgt

SEQ ID NO: 447 - DNA, 35 bp, Artificial Sequence
  Synthetic Oligonucleotide
ggttggtagtctcgaattgctctctttcactggcc

SEQ ID NO: 448 - DNA, 48 bp, Artificial Sequence
  Synthetic Oligonucleotide
gaaattaatacgactcactatagggggttggttcatggtcatattggt

SEQ ID NO: 449 - DNA, 57 bp, Artificial Sequence
  Synthetic Oligonucleotide
gaaattaatacgactcactatagggggttggtgtggttggttcatggtcatattggt

SEQ ID NO: 450 - DNA, 31 bp, Artificial Sequence
  Synthetic Oligonucleotide
ggccagtgaaagagagcaattcgagactacc

SEQ ID NO: 451 - RNA, 64 nt, Artificial Sequence
  Synthetic Oligonucleotide
gauuuagacuaccccaaaaacgaaggggacuaaaacccagugaaagagagcaauucgagacuac

SEQ ID NO: 452 - RNA, 64 nt, Artificial Sequence
  Synthetic Oligonucleotide
gauuuagacuaccccaaaaacgaaggggacuaaaacaaagagagcaauucgagacuaccaacca

SEQ ID NO: 453 - RNA, 64 nt, Artificial Sequence
  Synthetic Oligonucleotide
gauuuagacuaccccaaaaacgaaggggacuaaaacagacuaccaaccacagagacugugguug

SEQ ID NO: 454 - DNA, 106 bp, Artificial Sequence
  Synthetic Oligonucleotide
gttagatcgcaagcatatcattgcgcttgcgatctaactgctgcgccgccgggaaaatactgtacggttagatcgcatagtctcgaattgctctctttcactggcc

SEQ ID NO: 455 - DNA, 71 bp, Artificial Sequence
  Synthetic Oligonucleotide
gttagatcgcaagcatatcattgcgcttgcgatctaactgctgcgccgccgggaaaatactgtacggttag

SEQ ID NO: 456 - DNA, 35 bp, Artificial Sequence
  Synthetic Oligonucleotide
atcgcatagtctcgaattgctctctttcactggcc

SEQ ID NO: 457 - DNA, 50 bp, Artificial Sequence
  Synthetic Oligonucleotide
gaaattaatacgactcactatagggatcgcaagcatatcattgcgcttgc

SEQ ID NO: 458 - DNA, 31 bp, Artificial Sequence
  Synthetic Oligonucleotide
ggccagtgaaagagagcaattcgagactatg

SEQ ID NO: 459 - RNA, 64 nt, Artificial Sequence
  Synthetic Oligonucleotide
gauuuagacuaccccaaaaacgaaggggacuaaaacccagugaaagagagcaauucgagacuau

SEQ ID NO: 460 - RNA, 64 nt, Artificial Sequence
  Synthetic Oligonucleotide
gauuuagacuaccccaaaaacgaaggggacuaaaacagagcaauucgagacuaugcgaucuaac

SEQ ID NO: 461 - RNA, 64 nt, Artificial Sequence
  Synthetic Oligonucleotide
gauuuagacuaccccaaaaacgaaggggacuaaaacacuaugcgaucuaaccguacaguauuuu

SEQ ID NO: 462 - protein, 7 aa, Artificial Sequence
  Synthetic Peptide
PKKKRKV

SEQ ID NO: 463 - protein, 16 aa, Artificial Sequence
  Synthetic Peptide
KRPAATKKAGQAKKKK

SEQ ID NO: 464 - protein, 9 aa, Artificial Sequence
  Synthetic Peptide
PAAKRVKLD

SEQ ID NO: 465 - protein, 11 aa, Artificial Sequence
  Synthetic Peptide
RQRRNELKRSP

SEQ ID NO: 466 - protein, 38 aa, Artificial Sequence
  Synthetic Peptide
NQSSNFGPMKGGNFGGRSSGPYGGGGQYFAKPRNQGGY

SEQ ID NO: 467 - protein, 42 aa, Artificial Sequence
  Synthetic Peptide
RMRIZFKNKGKDTAELRRRRVEVSVELRKAKKDEQILKRRNV

SEQ ID NO: 468 - protein, 8 aa, Artificial Sequence
  Synthetic Peptide
VSRKRPRP

SEQ ID NO: 469 - protein, 8 aa, Artificial Sequence
  Synthetic Peptide
PPKKARED

SEQ ID NO: 470 - protein, 8 aa, Artificial Sequence
  Synthetic Peptide
PQPKKKPL

SEQ ID NO: 471 - protein, 12 aa, Artificial Sequence
  Synthetic Peptide
SALIKKKKKMAP

SEQ ID NO: 472 - protein, 5 aa, Artificial Sequence
  Synthetic Peptide
DRLRR

SEQ ID NO: 473 - protein, 7 aa, Artificial Sequence
  Synthetic Peptide
PKQKKRK

SEQ ID NO: 474 - protein, 10 aa, Artificial Sequence
  Synthetic Peptide
RKLKKKIKKL

SEQ ID NO: 475 - protein, 10 aa, Artificial Sequence
  Synthetic Peptide
REKKKFLKRR

SEQ ID NO: 476 - protein, 20 aa, Artificial Sequence
  Synthetic Peptide
KRKGDEVDGVDEVAKKKSKK

SEQ ID NO: 477 - protein, 17 aa, Artificial Sequence
  Synthetic Peptide
RKCLQAGMNLEARKTKK

SEQ ID NO: 478 - protein, 107 aa, Homo sapiens
IEVMYPPPYLDNEKSNGTIIHVKGKHLCPSPLFPGPSKPFWVLVVVGGVLACYSLLVTVAFIIFWVRSKRSRLLHSDYMNMTPRRPGPTRKHYQPYAPPRDFAAYRS

SEQ ID NO: 479 - protein, 107 aa, Homo sapiens; identical to SEQ ID NO: 478

SEQ ID NO: 480 - DNA, 20 bp, Artificial Sequence
  Synthetic Oligonucleotide
gccaaattggacgaccctcg

SEQ ID NO: 481 - DNA, 20 bp, Artificial Sequence
  Synthetic Oligonucleotide
cgaggagacccccgtttcgg

SEQ ID NO: 482 - DNA, 20 bp, Artificial Sequence
  Synthetic Oligonucleotide
cccgccgccgccgtggctcg

SEQ ID NO: 483 - DNA, 20 bp, Artificial Sequence
  Synthetic Oligonucleotide
tgagctctacgagatccaca

SEQ ID NO: 484 - protein, 1145 aa, Alicyclobacillus macrosporangiidus
MVAVKSIKVKLMLGHLPEIREGLWHLHEAVNLGVRYYTEWLALLRQGNLYRRGKDGAQECYMTAEQCRQELLVRLRDRQKRNGHTGDPGTDEELLGVARRLYELLVPQSVGKKGQAQMLASGFLSPLADPKSEGGKGTSKSGRKPAWMGMKEAGDSRWVEAKARYEANKAKDPTKQVIASLEMYGLRPLFDVFTETYKTIRWMPLGKHQGVRAWDRDMFQQSLERLMSWESWNERVGAEFARLVDRRDRFREKHFTGQEHLVALAQRLEQEMKEASPGFESKSSQAHRITKRALRGADGIIDDWLKLSEGEPVDRFDEILRKRQAQNPRRFGSHDLFLKLAEPVFQPLWREDPSFLSRWASYNEVLNKLEDAKQFATFTLPSPCSNPVWARFENAEGTNIFKYDFLFDHFGKGRHGVRFQRMIVMRDGVPTEVEGIVVPIAPSRQLDALAPNDAASPIDVFVGDPAAPGAFRGQFGGAKIQYRRSALVRKGRREEKAYLCGFRLPSQRRTGTPADDAGEVFLNLSLRVESQSEQAGRRNPPYAAVFHISDQTRRVIVRYGEIERYLAEHPDTGIPGSRGLTSGLRVMSVDLGLRTSAAISVFRVAHRDELTPDAHGRQPFFFPIHGMDHLVALHERSHLIRLPGETESKKVRSIREQRLDRLNRLRSQMASLRLLVRTGVLDEQKRDRNWERLQSSMERGGERMPSDWWDLFQAQVRYLAQHRDASGEAWGRMVQAAVRTLWRQLAKQVRDWRKEVRRNADKVKIRGIARDVPGGHSLAQLDYLERQYRFLRSWSAFSVQAGQVVRAERDSRFAVALREHIDNGKKDRLKKLADRILMEALGYVYVTDGRRAGQWQAVYPPCQLVLLEELSEYRFSNDRPPSENSQLMVWSHRGVLEELIHQAQVHDVLVGTIPAAFSSRFDARTGAPGIRCRRVPSIPLKDAPSIPIWLSHYLKQTERDAAALRPGELIPTGDGEFLVTPAGRGASGVRVVHADINAAHNLQRRLWENFDLSDIRVRCDRREGKDGTVVLIPRLTNQRVKERYSGVIFTSEDGVSFTVGDAKTRRRSSASQGEGDDLSDEEQELLAEADDARERSVVLFRDPSGFVNGGRWTAQRAFWGMVHNRIETLLAERFSVSGAAEKVRG

SEQ ID NO: 485 - protein, 1108 aa, Bacillus hisashii
MATRSFILKIEPNEEVKKGLWKTHEVLNHGIAYYMNILKLIRQEAIYEHHEQDPKNPKKVSKAEIQAELWDFVLKMQKCNSFTHEVDKDEVFNILRELYEELVPSSVEKKGEANQLSNKFLYPLVDPNSQSGKGTASSGRKPRWYNLKIAGDPSWEEEKKKWEEDKKKDPLAKILGKLAEYGLIPLFIPYTDSNEPIVKEIKWMEKSRNQSVRRLDKDMFIQALERFLSWESWNLKVKEEYEKVEKEYKTLEERIKEDIQALKALEQYEKERQEQLLRDTLNTNEYRLSKRGLRGWREIIQKWLKMDENEPSEKYLEVFKDYQRKHPREAGDYSVYEFLSKKENHFIWRNHPEYPYLYATFCEIDKKKKDAKQQATFTLADPINHPLWVRFEERSGSNLNKYRILTEQLHTEKLKKKLTVQLDRLIYPTESGGWEEKGKVDIVLLPSRQFYNQIFLDIEEKGKHAFTYKDESIKFPLKGTLGGARVQFDRDHLRRYPHKVESGNVGRIYFNMTVNIEPTESPVSKSLKIHRDDFPKVVNFKPKELTEWIKDSKGKKLKSGIESLEIGLRVMSIDLGQRQAAAASIFEVVDQKPDIEGKLFFPIKGTELYAVHRASFNIKLPGETLVKSREVLRKAREDNLKLMNQKLNFLRNVLHFQQFEDITEREKRVTKWISRQENSDVPLVYQDELIQIRELMYKPYKDWVAFLKQLHKRLEVEIGKEVKHWRKSLSDGRKGLYGISLKNIDEIDRTRKFLLRWSLRPTEPGEVRRLEPGQRFAIDQLNHLNALKEDRLKKMANTIIMHALGYCYDVRKKKWQAKNPACQIILFEDLSNYNPYEERSRFENSKLMKWSRREIPRQVALQGEIYGLQVGEVGAQFSSRFHAKTGSPGIRCSVVTKEKLQDNRFFKNLQREGRLTLDKIAVLKEGDLYPDKGGEKFISLSKDRKCVTTHADINAAQNLQKRFWTRTHGFYKVYCKAYQVDGQTVYIPESKDQKQKIIEEFGEGYFILKDGVYEWVNAGKLKIKKGSSKQSSSELVDSDILKDSFDLASELKGEKLMLYRDPSGNVFPSDKWMAAGVFFGKLERILISKLTNQYSISTIEDDSSKQSM

SEQ ID NO: 486 - protein, 1364 aa, Unknown
  Uncultured organism
MPRDDLDLLTNLNSTAKGIRERGKTKEGTDKKKSGRKSSWPMDKAAWETAKTSDSSAHFLEKLKQHPDLKDAFGNLSSGGSKKLEYYKKLAGSAPWKESQSVILEKAARWKEAKQEREEKEQDSSEHGSKAAYRRLFDAGCLPMPEFAKYIDENQIEFGDLKLSDCGAEWKRGMWNQAGQRVRSHMGWQRRREKENAVYSLRKELFEKGGAIRRKKSEELTPEDILPGKAAPDQNDWQERPAYGNQMWFIGLRSYEENEMAKYAEEAGMGSRSAPRIRRGTIKGWSKLRERWLQILKRNPQATRDDLIGELNALRSQDPRAYGDARLFDWLSKTDQRFLWDGFDADGKILCGRDDRDCVSAFVAYNEEFADEPSSITLTETDERLHPVWPFFGESSAVPYEIEYDLETACPTAIRLPLLVGKENGGYAERQGTRLPLAEYADLASSFQLPTPVRLDVLVEIREVTRAGRKVTCPFSYFKQNGVWYVREGEIPSGESIQIKQTDRKIENGKIFISSKLRMAYRDDLMVSPATGDFGSIKILWERIELASHVDQKKLPETAPARSRVFVSFSCNVVERAPRKQLTRKPDAVVVTIPSGVDQGLVVVSTDVRTGKSKSSSAPPLPPGSRLWPADAVHGDPPLRILSVDLGHRHSAYAVWELGLQQKSWRAGVLKGSTQTPVYADCTGTGLLCLPGDGEDTPAEEESLRLRSRQIRRRLNLQNSILRVSRLLSLDKFEKTIFEQSDVRDRPNKKGLRIRRRCRTEKTPLSEAEVRKNCDKAAEILIRWADTDAMAKSLAATGNADISFWKYMAVKNPPLSAVVDVAPSTIVPDDGPDRETLKKKRQEEEEKFASSIYENRVKLAGALCSGYDADHRRPATGGLWHDLDRTLIREISYGDRGQKGNPRKLNNEGILRLLRRPPRARPDWREFHRTLNDANRIPKGRTLRGGLSMGRLNFLKEVGDFVKKWSCRPRWPGDRRHIPPGQLFDRQDAEHLEHLRDDRIKRLAHLIVAQALGFEPDIRRGLWKYVDGSTGEILWQHPETRRFFAEGAAGELREVSRPAEIDDDAAARPHTVSAPAHIVVFENLIRYRFQSDRPKTENAGLMQWAHRQIVHFTKQVASLYGLKVAMVYAAFSSKFCSRCGSPGARVSRFDPAWRNQEWFKRRTSNPRSKVDHSLKRASEDPTADETRPWVLIEGGKEFVCANAKCSAHDEPLNADENAAANIGLRFLRGVEDFRTKVNPAGALKGKLRFETGIHSFRPPVSGSPFWSPMAEPAQKKKIGAAAPGADVDEAGDADESGVVVLFRDPSGAFRNKQYWYEGKIFWSNVMMAVEAKIAGASVGAKPVAASWGQAQPQSGPGLAKPGGD

SEQ ID NO: 487 - protein, 1364 aa, Unknown
  Uncultured organism
MNRIYQGRVTKVEVPDGKDEKGNIKWKKLENWSDILWQHHMLFQDAVNYYTLALAAISGSAVGSDEKSIILREWAVQVQNIWEKAKKKATVFEGPQKRLTSILGLEQNASFDIAAKHILRTSEAKPEQRASALIRLLEEIDKKNHNVVCGERLPFFCPRNIQSKRSPTSKAVSSVQEQKRQEEVRRFHNMQPEEVVKNAVTLDISLFKSSPKIVFLEDPKKARAELLKQFDNACKKHKELVGIKKAFTESIDKHGSSLKVPAPGSKPSGLYPSAIVFKYFPVDITKTVFLKATEKLAMGKDREVTNDPIADARVNDKPHFDYFTNIALIREKEKNRAAWFEFDLAAFIEAIMSPHRFYQDTQKRKEAARKLEEKIKAIEGKGGQFKESDSEDDDVDSLPGFEGDTRIDLLRKLVTDTLGWLGESETPDNNEGKKTEYSISERTLRIFPDIQKQWSELAEKGETTEGKLLEVLKHEQTEHQSDFGSATLYQHLAKPEFHPIWLKSGTEEWHAENPLKAWLNYKELQYELTDKKRPIHFTPAHPVYSPRYFDFPKKSETEEKEVSKNTHSLTTSLASEHIKNSLQFTAGLIRKTNVGKKAIKARFSYSAPRLRRDCLRSENNENLYKAPWLQPMMRALGIDEEKADRQNFANTRITLMAKGLDDIQLGFPVEANSQELQKEVSNGISWKGQFNWGGIASLSALRWPHEKKPKNPPEQPWWGIDSFSCLAVDLGQRYAGAFARLDVSTIEKKGKSRFIGEACDKKWYAKVSRMGLLRLPGEDVKVWRDASKIDKENGFAFRKELFGEKGRSATPLEAEETAELIKLFGANEKDVMPDNWSKELSFPEQNDKLLIVARRAQAAVSRLHRWAWFFDEAKRSDDAIREILESDDTDLKQKVNKNEIEKVKETIISLLKVKQELLPTLLTRLANRVLPLRGRSWEWKKHHQKNDGFILDQTGKAMPNVLIRGQRGLSMDRIEQITELRKRFQALNQSLRRQIGKKAPAKRDDSIPDCCPDLLEKLDHMKEQRVNQTAHMILAEALGLKLAEPPKDKKELNETCDMHGAYAKVDNPVSFIVIEDLSRYRSSQGRSPRENSRLMKWCHRAVRDKLKEMCEVFFPLCERRKAGSAWVSLPPLLETPAAYSSRFCSRSGVAGFRAVEVIPGFELKYPWSWLKDKKDKAGNLAKEALNIRTVSEQLKAFNQDKPEKPRTLLVPIAGGPIFVPISEVGLSSFGLKPQVVQADINAAINLGLRAISDPRIWEIHPRLRTEKRDGRLFAREKRKYGEEKVEVQPSKNEKAKKVKDDRKPNYFADFSGKVDWGFGNIKNESGLTLVSGKALWWTINQLQWERCFDINKRHIEDWSNKQKQ

SEQ ID NO: 488 - protein, 1413 aa, Unknown
  Uncultured organism
MNRIYQGRVTKVEKLKNGKSPDDREELKDWQTALWRHHELFQDAVSYYTLALAAMAEGLPDKHPINVLRKRMEEAWEEFPRKTVTPAKNLRDSVRPWLGLSESASFGDALKKILPPAPENKEVRALAVALLAEKARTLKPQKTSASYWGRFCDDLKKKPNWDYSEEELARKTGSGDWVAGLWSEDALNKIDELAKSLKLSSLVKCVPDGQINPEGARNLVKEALDHLEGVSNGTKKEKNDPGPAKKTNNWLRQHASDVRNFIHKNKNQFSSLPNGRLITERARGGGININKTYAGVLFKAFPCPFTFDYVRAAVPEPKVKKVDQEKKSEQSATWTELEKRILRIGDDPIELARKNNKPIFKAFTALEKWSDQNSKSCWSDFDKCAFEEALKTLNQFNQKTEEREKRRSEAEAELKYMMDENPEWKPKKETEGDDVREVPILKGDPRYEKLVKLFGDLDEEGSEHATGKIYGPSRASLRGFGKLRNEWVDLFTKANDNPREQDLQKAVTGFQREHKLDMGYTAFFLKLCERDYWDIWRDDTEVEVKKIREKRWVKSVVYAAADTRELAEELERLQEPVRYTPAEPQFSRRLFMFSDIKGKQGAKHIREGLVEVSLAVKDQSGKYGTCRVRLHYSAPRLIRDHLSDGSSSMWLQPMMAALGLSSDARGCFTRDSKGNVKEPAVALMSDFVGRKRELRMLLNFPVDLDISKLEENIGKKARWEKQMNTAYEKNKLKQRFHLIWPGMELKETQEPGQFWWDNPTIQKEGMYCLAIDLSQRRAADYALLHAGVNRDSKTFVELGQAGGQSWFTKLCAAGSLRLPGEDTEVIREGKRQIELSGKKGRNATQSEYDQAIALAKQLLHNENSAELESAARDWLGDNAKRFSFPEQNDKLIDLYYGALSRYKTWLRWSWRLTEQHKELWDKTLDEIRKVPYFASWGELAGNGTNEATVQQLQKLIADAAVDLRNFLEKALLHIAYRALPLRENTWRWIENGKDGKGKPLHLLVSDGQSPAEIPWLRGQRGLSIARIEQLENFRRAVLSLNRLLRHEIGTKPEFGSSTCGESLPDPCPDLTDKIVRLKEERVNQTAHLIIAQSLGVRLKGHSLFTEEREKADMHGEHEVIPGRSPVDFVVLEDLSRYTTDKSRSRSENSRLMKWCHRKINEKVKLLAEPFGIPVIEVFASYSSKFDARTGAPGFRAVEVTSEDRPFWRKTIEKQSVAREVFDCLDNLVGKGLNGIHLVLPQNGGPLFIAAVKEDQPLPAIRQADINAAVNIGLRAIAGPSCYHAHPKVRLIKGESGTDKGKWLPRKGKEANKRENAQFGNVDLDLEVKFNRLDIDSDVLKGDNTNLFHDPLNIACYGFATIQNLQHPFLAHASAVFSRQKGAVARLQWEVCRAINSRRLEAWQKKAEKAAVKR

SEQ ID NO: 489 - protein, 747 aa, Unknown
  Bacterium in the Phycisphaerae family
MATKSYRARILTDSRLAAALDRTHVVFVESLKQMINTYLRMQNGKFGPDHKKLAQIMLSRSNTFAHGVMDQITRDQPTSTLDEEWTDLARRIHKTTGPLFLQAERFATVKNRAIHTKSRGKVIPSPETLAVPAKFWHQVCDSASAYIRSNRELMQQWRKDRAAWLKDKNEWQQKHPEFMQFYNGPYQNFLKLCDDDRITSQLAAEQQPTASKNNRPRKTGKRFARWHLWYKWLSENPEIIEWRNKASASDFKTVTDDVRKQIITKYPQQNKYITRLLDWLEDNNPELKTLENLRRTYVKKFDSFKRPPTLTLPSPYRHPYWFTMELDQFYKKADFENGTIQLLLIDEDDDGNWFFNWMPASLKPDPRLVPSWRAETFETEGRFPPYLGGKIGKKLSRPAPTDAERKAGIAGAKLMIKNNRSELLFTVFEQDCPPRVKWAKTKNRKCPADNAFSSDGKTRKPLRILSIDLGIRHIGAFALTQGTRNDSAWQTESLKKGIINSPSIPPLRQVRRHDYDLKRKRRRHGKPVKGQRSNANLQAHRTNMAQDRFKKGASAIVSLAREHSADLILFENLHSLKFSAFDERWMNRQLRDMNRRHIVELVSEQAPEFGITVKDDINPWMTSRICSNCNLPGFRFSMKKKNPYREKLPREKCTDFGYPVWEPGGHLFRCPHCDHRVNADINAAANLANKFFGLGYWNNGLKYDAETKTFTVHTDKKTPPLIFKPRPQFDLWADSVKTRKQLGPDPF

SEQ ID NO: 490 - protein, 743 aa, Unknown
  Member of the Planctomycetes phylum
MSVRSFQARVECDKQTMEHLWRTHKVFNERLPEIIKILFKMKRGECGQNDKQKSLYKSISQSILEANAQNADYLLNSVSIKGWKPGTAKKYRNASFTWADDAAKLSSQGIHVYDKKQVLGDLPGMMSQMVCRQSVEAISGHIELTKKWEKEHNEWLKEKEKWESEDEHKKYLDLREKFEQFEQSIGGKITKRRGRWHLYLKWLSDNPDFAAWRGNKAVINPLSEKAQIRINKAKPNKKNSVERDEFFKANPEMKALDNLHGYYERNFVRRRKTKKNPDGFDHKPTFTLPHPTIHPRWFVFNKPKTNPEGYRKLILPKKAGDLGSLEMRLLTGEKNKGNYPDDWISVKFKADPRLSLIRPVKGRRVVRKGKEQGQTKETDSYEFFDKHLKKWRPAKLSGVKLIFPDKTPKAAYLYFTCDIPDEPLTETAKKIQWLETGDVTKKGKKRKKKVLPHGLVSCAVDLSMRRGTTGFATLCRYENGKIHILRSRNLWVGYKEGKGCHPYRWTEGPDLGHIAKHKREIRILRSKRGKPVKGEESHIDLQKHIDYMGEDRFKKAARTIVNFALNTENAASKNGFYPRADVLLLENLEGLIPDAEKERGINRALAGWNRRHLVERVIEMAKDAGFKRRVFEIPPYGTSQVCSKCGALGRRYSIIRENNRREIRFGYVEKLFACPNCGYCANADHNASVNLNRRFLIEDSFKSYYDWKRLSEKKQKEEIETIESKLMDKLCAMHKISRGSISK

SEQ ID NO: 491 - protein, 1119 aa, Unknown
  Member of the Spirochaetes phylum
MSFTISYPFKLIIKNKDEAKALLDTHQYMNEGVKYYLEKLLMFRQEKIFIGEDETGKRIYIEETEYKKQIEEFYLIKKTELGRNLTLTLDEFKTLMRELYICLVSSSMENKKGFPNAQQASLNIFSPLFDAESKGYILKEENNNISLIHKDYGKILLKRLRDNNLIPIFTKFTDIKKITAKLSPTALDRMIFAQAIEKLLSYESWCKLMIKERFDKEVKIKELENKCENKQERDKIFEILEKYEEERQKTFEQDSGFAKKGKFYITGRMLKGFDEIKEKWLKEKDRSEQNLINILNKYQTDNSKLVGDRNLFEFIIKLENQCLWNGDIDYLKIKRDINKNQIWLDRPEMPRFTMPDFKKHPLWYRYEDPSNSNFRNYKIEVVKDENYITIPLITERNNEYFEENYTFNLAKLKKLSENITFIPKSKNKEFEFIDSNDEEEDKKDQKKSKQYIKYCDTAKNTSYGKSGGIRLYFNRNELENYKDGKKMDSYTVFTLSIRDYKSLFAKEKLQPQIFNTVDNKITSLKIQKKFGNEEQTNFLSYFTQNQITKKDWMDEKTFQNVKELNEGIRVLSVDLGQRFFAAVSCFEIMSEIDNNKLFFNLNDQNHKIIRINDKNYYAKHIYSKTIKLSGEDDDLYKERKINKNYKLSYQERKNKIGIFTRQINKLNQLLKIIRNDEIDKEKFKELIETTKRYVKNTYNDGIIDWNNVDNKILSYENKEDVINLHKELDKKLEIDFKEFIRECRKPIFRSGGLSMQRIDFLEKLNKLKRKWVARTQKSAESIVLTPKFGYKLKEHINELKDNRVKQGVNYILMTALGYIKDNEIKNDSKKKQKEDWVKKNRACQIILMEKLTEYTFAEDRPREENSKLRMWSHRQIFNFLQQKASLWGILVGDVFAPYTSKCLSDNNAPGIRCHQVTKKDLIDNSWFLKIVVKDDAFCDLIEINKENVKNKSIKINDILPLRGGELFASIKDGKLHIVQADINASRNIAKRFLSQINPFRVVLKKDKDETFHLKNEPNYLKNYYSILNFVPTNEELTFFKVEENKDIKPTKRIKMDKHEKESTDEGDDYSKNQIALFRDDSGIFFDKSLWVDGKIFWSVVKNKMTKLLRERNNKKNGSK

SEQ ID NO: 492 - protein, 1447 aa, Unknown
  Member of the phylum Verrucomicrobiaceae
MPLSRIYQGRTNSLIILTPTPQEPWDHKALARFDSPLWRHHALFQDAVNYYQLCLVALASSDGTRPLSKLHEQMKASWDEAKTDTEDSWRVRLARRLGIPAASLFEAALAKVLEGNEAPERARELAGELLLDKIEGDIQQAGRGYWPRFCDPKANPTYDYSATARASASGLTKLAAVIHAENVTEEALKQVAAEMDLSWTVKLQPDKNFVGAEARARLLEAAHHFIKVAESPPTKLAEVLARFPDGLALWQALPEKIAALPEETQVPRNRKASPDLTFATLLFQHFPSLFTAAVLGLSVGKPKSVKAPKVVEKVSARRKANAVTQAVVIEEPEIDFAELGDDPIKLARGERGFVFPAFTSLSFWAVPGPHVPVWKEFDIAAFKEALKTVNQFKLKTSERNALLAEAQRRLDYMDEKTHDWKTGDSDEPGHIPPRLKSDPNFTLIQALTQDEGVSNKATGDQHIPKGVYTGGLRGFYAIKKDWCELWERKADKSQGTPTEEELISIVTDYQRDHVYDVGDVGLFRALCEPRFWPLWQPLTDEQEAERIKAGRAKDMISAYRVWLELQEDVVRLAQPIRFTPAHAENSRRLFMFSDISGSHGAEFGSDGKSLEVSIAYDVDGKLQPVRAKLEFSAPRAARDELEGLSGGSESMRWFQPMMKALDCPEVEMPALEKCAVSLMPDVVKKGGGKWVRLLLNFPATLEPEGLIRHIGKQAMWYKQFNGTYKPRTQQLDTGLHLYWPGLEKAPEAEDAAAWWNREEIRAKGFSVLSVDLGQRDAGAWALLESRSDKAFSRNRQPFIELGEAGGKLWSTALLGLGMLRLPGEDARTGALDDQGKRAVEFHGKAGRNALEAEWQEAREMALLFGGEEAKSRLGPGFDHLSHSKQNEELLRILSRAQSRLARFHRWSCRIHEKPEATGDDVIDYGQVDELLTKTAEAMLENLKALYTNAGGILDSKSKQPLTLVGLRKKLEAQKVEPEKIAAVLKPHAEIIFQRLGTLIPELKQHLRVSLERLANRELPLRHREWVWNEAFEKLEQGNFKKEENPKWIRGQRGLSMARIEQIENLRKRFMSLRRQMSLIPGEQVKQGVEDKGQRQPEPCEDILNKLDRMKQQRVNQTAHLILAQALGLRLRPHLANDAEREEKDIHGEYELIPGRKPVDFIVMEDLSRYLSSQGRAPSENGRLMKWCHRAVLAKLKQMCEPFGIPVLEVPAAYSSRFCALTGVPGFRAVEVHDGNAEDFRWKRLIKKAEKDKSSKDAEAAAMLFDQLHDLNIEAREARKQDKKLPLRTLFAPVAGGPLFIPMVGGGPRQADMNAAINLGLRAIASPTCLRARPKIRAELKDGKHQAMLGNKLEKAAALTLEPPKEPTKELAAQKRTNFFLDEKFVGKFDTAHVTTSGKKLRLSGGMSLWKAIKDGAWQRVKKINDARIAKWKNNPPPEPDPDDEIQF

SEQ ID NO: 493 - protein, 1147 aa, Alicyclobacillus kakegawensis; identical to SEQ ID NO: 379

SEQ ID NO: 494 - protein, 1112 aa, Bacillus species; identical to SEQ ID NO: 380

SEQ ID NO: 495 - protein, 1489 aa, Desulfatirhabdium butyrativorans; identical to SEQ ID NO: 381

SEQ ID NO: 496 - protein, 1194 aa, Desulfonatronum thiodismutans; identical to SEQ ID NO: 382

SEQ ID NO: 497 - protein, 1326 aa, Unknown; identical to SEQ ID NO: 383
  Lentisphaeria bacterium

SEQ ID NO: 498 - protein, 1090 aa, Laceyella sediminis; identical to SEQ ID NO: 384

SEQ ID NO: 499 - protein, 1041 aa, Methylobacterium nodulans; identical to SEQ ID NO: 385

SEQ ID NO: 500 - protein, 1388 aa, Unknown; identical to SEQ ID NO: 386
  Member of the phylum Opitutaceae

SEQ ID NO: 501 - DNA, 162 bp, Unknown
  Member of the class Phycisphaerae
caacatgctcgctttgcgaaggctgacggcccgctctcatttggcattgccgggagccggagttttcggaagagagtgtcgacgactgctgatctccgcatccgcgtcctgttcgccaggccgggtcgggtgtacggatcatgctggcagcagtctacgccg

SEQ ID NO: 502 - RNA, 60 nt, Unknown; identical to SEQ ID NO: 2
  Member of the class Phycisphaerae

SEQ ID NO: 503 - RNA, 62 nt, Unknown; identical to SEQ ID NO: 3
  Member of the class Phycisphaerae

SEQ ID NO: 504 - RNA, 118 nt, Unknown; identical to SEQ ID NO: 4
  Member of the class Phycisphaerae

SEQ ID NO: 505 - RNA, 87 nt, Unknown; identical to SEQ ID NO: 5
  Member of the class Phycisphaerae

SEQ ID NO: 506 - RNA, 71 nt, Unknown; identical to SEQ ID NO: 6
  Member of the class Phycisphaerae

SEQ ID NO: 507 - RNA, 61 nt, Unknown; identical to SEQ ID NO: 7
  Member of the class Phycisphaerae

SEQ ID NO: 508 - RNA, 87 nt, Unknown; identical to SEQ ID NO: 8
  Member of the class Phycisphaerae

SEQ ID NO: 509 - RNA, 84 nt, Unknown; identical to SEQ ID NO: 9
  Member of the class Phycisphaerae

SEQ ID NO: 510 - RNA, 84 nt, Unknown; identical to SEQ ID NO: 9
  Member of the class Phycisphaerae

SEQ ID NO: 511 - RNA, 83 nt, Unknown
  Member of the class Phycisphaerae
uccgcauccgcguccuguucgccaggccgggucggguguacggaucaugcuggcagcagucuacgccgagaacauucgcuuuu

SEQ ID NO: 512 - DNA, 32 bp, Unknown
  Member of the class Phycisphaerae
ggcgcaacccgcacacaaccgcgaatggacac

SEQ ID NO: 513 - DNA, 14 bp, Unknown
  Member of the class Phycisphaerae
ccgcgaatggacac

SEQ ID NO: 514 - RNA, 20 nt, Artificial Sequence
  Synthetic Oligonucleotide
uggguuggguuggguuggga

SEQ ID NO: 515 - RNA, 23 nt, Artificial Sequence
  Synthetic Oligonucleotide
uggguuuggguuuggguuuggga

SEQ ID NO: 516 - protein, 1129 aa, Alicyclobacillus acidoterrestris
MAVKSIKVKLRLDDMPEIRAGLWKLHKEVNAGVRYYTEWLSLLRQENLYRRSPNGDGEQECDKTAEECKAELLERLRARQVENGHRGPAGSDDELLQLARQLYELLVPQAIGAKGDAQQIARKFLSPLADKDAVGGLGIAKAGNKPRWVRMREAGEPGWEEEKEKAETRKSADRTADVLRALADFGLKPLMRVYTDSEMSSVEWKPLRKGQAVRTWDRDMFQQAIERMMSWESWNQRVGQEYAKLVEQKNRFEQKNFVGQEHLVHLVNQLQQDMKEASPGLESKEQTAHYVTGRALRGSDKVFEKWGKLAPDAPFDLYDAEIKNVQRRNTRRFGSHDLFAKLAEPEYQALWREDASFLTRYAVYNSILRKLNHAKMFATFTLPDATAHPIWTRFDKLGGNLHQYTFLFNEFGERRHAIRFHKLLKVENGVAREVDDVTVPISMSEQLDNLLPRDPNEPIALYFRDYGAEQHFTGEFGGAKIQCRRDQLAHMHRRRGARDVYLNVSVRVQSQSEARGERRPPYAAVFRLVGDNHRAFVHFDKLSDYLAEHPDDGKLGSEGLLSGLRVMSVDLGLRTSASISVFRVARKDELKPNSKGRVPFFFPIKGNDNLVAVHERSQLLKLPGETESKDLRAIREERQRTLRQLRTQLAYLRLLVRCGSEDVGRRERSWAKLIEQPVDAANHMTPDWREAFENELQKLKSLHGICSDKEWMDAVYESVRRVWRHMGKQVRDWRKDVRSGERPKIRGYAKDVVGGNSIEQIEYLERQYKFLKSWSFFGKVSGQVIRAEKGSRFAITLREHIDHAKEDRLKKLADRIIMEALGYVYALDERGKGKWVAKYPPCQLILLEELSEYQFNNDRPPSENNQLMQWSHRGVFQELINQAQVHDLLVGTMYAAFSSRFDARTGAPGIRCRRVPARCTQEHNPEPFPWWLNKFVVEHTLDACPLRADDLIPTGEGEIFVSPFSAEEGDFHQIHADLNAAQNLQQRLWSDFDISQIRLRCDWGEVDGELVLIPRLTGKRTADSYSNKVFYTNTGVTYYERERGKKRRKVFAQEKLSEEEAELLVEADEAREKSVVLMRDPSGIINRGNWTRQKEFWSMVNQRIEGYLVKQIRSRVPLQDSACENTGDI

SEQ ID NO: 517 - protein, 1147 aa, Alicyclobacillus kakegawensis; identical to SEQ ID NO: 379

SEQ ID NO: 518 - protein, 1146 aa, Alicyclobacillus macrosporangiidus
MNVAVKSIKVKLMLGHLPEIREGLWHLHEAVNLGVRYYTEWLALLRQGNLYRRGKDGAQECYMTAEQCRQELLVRLRDRQKRNGHTGDPGTDEELLGVARRLYELLVPQSVGKKGQAQMLASGFLSPLADPKSEGGKGTSKSGRKPAWMGMKEAGDSRWVEAKARYEANKAKDPTKQVIASLEMYGLRPLFDVFTETYKTIRWMPLGKHQGVRAWDRDMFQQSLERLMSWESWNERVGAEFARLVDRRDRFREKHFTGQEHLVALAQRLEQEMKEASPGFESKSSQAHRITKRALRGADGIIDDWLKLSEGEPVDRFDEILRKRQAQNPRRFGSHDLFLKLAEPVFQPLWREDPSFLSRWASYNEVLNKLEDAKQFATFTLPSPCSNPVWARFENAEGTNIFKYDFLFDHFGKGRHGVRFQRMIVMRDGVPTEVEGIVVPIAPSRQLDALAPNDAASPIDVFVGDPAAPGAFRGQFGGAKIQYRRSALVRKGRREEKAYLCGFRLPSQRRTGTPADDAGEVFLNLSLRVESQSEQAGRRNPPYAAVFHISDQTRRVIVRYGEIERYLAEHPDTGIPGSRGLTSGLRVMSVDLGLRTSAAISVFRVAHRDELTPDAHGRQPFFFPIHGMDHLVALHERSHLIRLPGETESKKVRSIREQRLDRLNRLRSQMASLRLLVRTGVLDEQKRDRNWERLQSSMERGGERMPSDWWDLFQAQVRYLAQHRDASGEAWGRMVQAAVRTLWRQLAKQVRDWRKEVRRNADKVKIRGIARDVPGGHSLAQLDYLERQYRFLRSWSAFSVQAGQVVRAERDSRFAVALREHIDNGKKDRLKKLADRILMEALGYVYVTDGRRAGQWQAVYPPCQLVLLEELSEYRFSNDRPPSENSQLMVWSHRGVLEELIHQAQVHDVLVGTIPAAFSSRFDARTGAPGIRCRRVPSIPLKDAPSIPIWLSHYLKQTERDAAALRPGELIPTGDGEFLVTPAGRGASGVRVVHADINAAHNLQRRLWENFDLSDIRVRCDRREGKDGTVVLIPRLTNQRVKERYSGVIFTSEDGVSFTVGDAKTRRRSSASQGEGDDLSDEEQELLAEADDARERSVVLFRDPSGFVNGGRWTAQRAFWGMVHNRIETLLAERFSVSGAAEKVRG

SEQ ID NO: 519 - protein, 1108 aa, Bacillus hisashii; identical to SEQ ID NO: 485

SEQ ID NO: 520 - protein, 1108 aa, Bacillus species; identical to SEQ ID NO: 387

SEQ ID NO: 521 - protein, 1108 aa, Bacillus thermoamylovorans
MATRSFILKIEPNEEVKKGLWKTHEVLNHGIAYYMNILKLIRQEAIYEHHEQDPKNPKKVSKAEIQAELWDFVLKMQKCNSFTHEVDKDVVFNILRELYEELVPSSVEKKGEANQLSNKFLYPLVDPNSQSGKGTASSGRKPRWYNLKIAGDPSWEEEKKKWEEDKKKDPLAKILGKLAEYGLIPLFIPFTDSNEPIVKEIKWMEKSRNQSVRRLDKDMFIQALERFLSWESWNLKVKEEYEKVEKEHKTLEERIKEDIQAFKSLEQYEKERQEQLLRDTLNTNEYRLSKRGLRGWREIIQKWLKMDENEPSEKYLEVFKDYQRKHPREAGDYSVYEFLSKKENHFIWRNHPEYPYLYATFCEIDKKKKDAKQQATFTLADPINHPLWVRFEERSGSNLNKYRILTEQLHTEKLKKKLTVQLDRLIYPTESGGWEEKGKVDIVLLPSRQFYNQIFLDIEEKGKHAFTYKDESIKFPLKGTLGGARVQFDRDHLRRYPHKVESGNVGRIYFNMTVNIEPTESPVSKSLKIHRDDFPKFVNFKPKELTEWIKDSKGKKLKSGIESLEIGLRVMSIDLGQRQAAAASIFEVVDQKPDIEGKLFFPIKGTELYAVHRASFNIKLPGETLVKSREVLRKAREDNLKLMNQKLNFLRNVLHFQQFEDITEREKRVTKWISRQENSDVPLVYQDELIQIRELMYKPYKDWVAFLKQLHKRLEVEIGKEVKHWRKSLSDGRKGLYGISLKNIDEIDRTRKFLLRWSLRPTEPGEVRRLEPGQRFAIDQLNHLNALKEDRLKKMANTIIMHALGYCYDVRKKKWQAKNPACQIILFEDLSNYNPYEERSRFENSKLMKWSRREIPRQVALQGEIYGLQVGEVGAQFSSRFHAKTGSPGIRCSVVTKEKLQDNRFFKNLQREGRLTLDKIAVLKEGDLYPDKGGEKFISLSKDRKLVTTHADINAAQNLQKRFWTRTHGFYKVYCKAYQVDGQTVYIPESKDQKQKIIEEFGEGYFILKDGVYEWGNAGKLKIKKGSSKQSSSELVDSDILKDSFDLASELKGEKLMLYRDPSGNVFPSDKWMAAGVFFGKLERILISKLTNQYSISTIEDDSSKQSM

SEQ ID NO: 522 - protein, 1112 aa, Bacillus species; identical to SEQ ID NO: 380

SEQ ID NO: 523 - protein, 1364 aa, Unknown; identical to SEQ ID NO: 486
  Member of the candidate phylum Lindowbacteriae

SEQ ID NO: 524 - protein, 1489 aa, Desulfatirhabdium butyrativorans; identical to SEQ ID NO: 381

SEQ ID NO: 525 - protein, 1194 aa, Desulfonatronum thiodismutan; identical to SEQ ID NO: 382

SEQ ID NO: 526 - protein, 1364 aa, Unknown; identical to SEQ ID NO: 487
  Member of the phylum Elusimicrobia

SEQ ID NO: 527 - protein, 1326 aa, Unknown; identical to SEQ ID NO: 383
  Member of the phylum Lentisphaeria

SEQ ID NO: 528 - protein, 1090 aa, Laceyella sediminis; identical to SEQ ID NO: 384

SEQ ID NO: 529 - protein, 1041 aa, Methylobacterium nodulans; identical to SEQ ID NO: 385

SEQ ID NO: 530 - protein, 1413 aa, Unknown; identical to SEQ ID NO: 488
  Member of the candidate phylum Omnitrophica

SEQ ID NO: 531 - protein, 1388 aa, Unknown; identical to SEQ ID NO: 386
  Member of the family Opitutaceae

SEQ ID NO: 532 - protein, 747 aa, Unknown; identical to SEQ ID NO: 489
  Member of the class Phycisphaerae

SEQ ID NO: 533 - protein, 743 aa, Unknown; identical to SEQ ID NO: 490
  Member of the phylum Planktomycetes

SEQ ID NO: 534 - protein, 1119 aa, Unknown; identical to SEQ ID NO: 491
  Member of the Spirochaetes

SEQ ID NO: 535 - protein, 1447 aa, Unknown; identical to SEQ ID NO: 492
  Member of the phylum Verrucomicrobiaceae

SEQ ID NO: 536 - RNA, 25 nt, Artificial Sequence
  Synthetic Oligonucleotide
uagaugaauuaaaugugauuagcac

SEQ ID NO: 537 - RNA, 80 nt, Artificial Sequence
  Synthetic Oligonucleotide
uuugccuaaagggcaaagaauacugugcgugugcuaaggauggaaaaaauccauucaaccacaggauuacauuauuuauc

SEQ ID NO: 538 - RNA, 105 nt, Artificial Sequence
  Synthetic Oligonucleotide
uuugccuaaagggcaaagaauacugugcgugugcuaaggauggaaaaaauccauucaaccacaggauuacauuauuuaucaaaagaugaauaaugugauuagcac

SEQ ID NO: 539 - RNA, 25 nt, Artificial Sequence
  Synthetic Oligonucleotide
agcgagcggucugagaaguggcacu

SEQ ID NO: 540 - RNA, 89 nt, Artificial Sequence
  Synthetic Oligonucleotide
gucgucuauaggacggcgaggacaacgggaagugccaaugugcucuuuccaagagcaaacaccccguuggcuucaagaugaccgcucgc

SEQ ID NO: 541 - RNA, 113 nt, Artificial Sequence; identical to SEQ ID NO: 85
  Synthetic Oligonucleotide

SEQ ID NO: 542 - RNA, 23 nt, Artificial Sequence
  Synthetic Oligonucleotide
gcagaaauaaugaugauuggcac

SEQ ID NO: 543 - RNA, 78 nt, Artificial Sequence
  Synthetic Oligonucleotide
gaccuauagggucaaugaaucugugcgugugccauaaguaauuaaaaauuacccaccacaggauuaucuuauuucugc

SEQ ID NO: 544 - RNA, 104 nt, Artificial Sequence; identical to SEQ ID NO: 97
  Synthetic Oligonucleotide

SEQ ID NO: 545 - RNA, 194 nt, Artificial Sequence
  Synthetic Oligonucleotide
ucagccaacaugcucgcuuugcgaaggcugacggcccgcucucauuuggcauugccgggagccggaguuuucggaagagagugucgacgacugcugaucuccgcauccgcguccuguucgccaggccgggucggguguacggaucaugcuggcagcagucuacgccgagaacauucgcuaccgcgaauggacac

SEQ ID NO: 546 - RNA, 194 nt, Artificial Sequence
  Synthetic Oligonucleotide
guggaguaaggucggaguaacgaccgaacguuuagcgugcuauaggccgcugaaugccacacagcgauguguuuugagugucaauagcugcugacccaaaggccaaaagccgaguagggcuugacugaugcgguuuauaucgcacauaggcggcaguaacacauaucgcgucaaucaaauuuauugauggacac

SEQ ID NO: 547 - RNA, 21 nt, Artificial Sequence
  Synthetic Oligonucleotide
gggcgaucugagaaguggcac

SEQ ID NO: 548 - RNA, 29 nt, Artificial Sequence
  Synthetic Oligonucleotide
cguugagcgggcgaucugagaaguggcac

SEQ ID NO: 549 - RNA, 36 nt, Artificial Sequence
  Synthetic Oligonucleotide
gucggaucguugagcgggcgaucugagaaguggcac

SEQ ID NO: 550 - DNA, 41 bp, Artificial Sequence
  Synthetic Oligonucleotide
cgatctgagaagtggcacgagaagtcatttaataaggccac

SEQ ID NO: 551 - RNA, 32 nt, Artificial Sequence
  Synthetic Oligonucleotide
ccgaucuauaggacggcagauucaacgggaug

SEQ ID NO: 552 - RNA, 38 nt, Artificial Sequence
  Synthetic Oligonucleotide
ccgaucuauaggacggcagauucaacgggaugugccaa

SEQ ID NO: 553 - RNA, 61 nt, Artificial Sequence
  Synthetic Oligonucleotide
ccgaucuauaggacggcagauucaacgggaugugccaaugcacucuuuccaggagugaaca

SEQ ID NO: 554 - RNA, 97 nt, Artificial Sequence
  Synthetic Oligonucleotide
ccgaucuauaggacggcagauucaacgggaugugccaaugcacucuuuccaggagugaacaccccguuggcuucaacaugaucgcccgcucaacggu

SEQ ID NO: 555 - RNA, 59 nt, Artificial Sequence
  Synthetic Oligonucleotide
ugccaaugcacucuuuccaggagugaacaccccguuggcuucaacaugaucgcccgcuc

SEQ ID NO: 556 - RNA, 139 nt, Artificial Sequence
  Synthetic Oligonucleotide
gccgaucuauaggacggcagauucaacgggaugugccaaugcacucuuuccaggagugaacaccccguuggcuucaacaugaucgcccgcucaacggucccuagucggaucguugagcgggcgaucugagaaguggcac

SEQ ID NO: 557 - RNA, 128 nt, Artificial Sequence
  Synthetic Oligonucleotide
gccgaucuauaggacggcagauucaacgggaugugccaaugcacucuuuccaggagugaacaccccguuggcuucaacaugaucgcccgcucaacgcuacguugagcgggcgaucugagaaguggcac

SEQ ID NO: 558 - RNA, 112 nt, Artificial Sequence
  Synthetic Oligonucleotide
gccgaucuauaggacggcagauucaacgggaugugccaaugcacucuuuccaggagugaacaccccguuggcuucaacaugaucgccccuagggcgaucugagaaguggcac

SEQ ID NO: 559 - RNA, 20 nt, Artificial Sequence
  Synthetic Oligonucleotide
augauacgaggcauuagcac

SEQ ID NO: 560 - RNA, 36 nt, Artificial Sequence
  Synthetic Oligonucleotide
guccaagaaaaaagaaaugauacgaggcauuagcac

SEQ ID NO: 561 - RNA, 89 nt, Artificial Sequence; identical to SEQ ID NO: 38
  Synthetic Oligonucleotide

SEQ ID NO: 562 - RNA, 99 nt, Artificial Sequence
  Synthetic Oligonucleotide
gagguucugucuuuuggucaggacaaccgucuagcuauaagugcugcagggugugagaaacuccuauugcuggacgaugucucuacgaggcauuagcac

SEQ ID NO: 563 - RNA, 106 nt, Artificial Sequence; identical to SEQ ID NO: 40
  Synthetic Oligonucleotide

SEQ ID NO: 564 - RNA, 102 nt, Artificial Sequence; identical to SEQ ID NO: 41
  Synthetic Oligonucleotide

SEQ ID NO: 565 - DNA, 120 bp, Artificial Sequence
  Synthetic Oligonucleotide
  misc_feature (98)..(120): n = any nucleotide
gttctgtcttttggtcaggacaaccgtctagctataagtgctgcagggtgtgagaaactcctattgctggacgacgcctcttacgaggcgttagcacnnnnnnnnnnnnnnnnnnnnnnn

SEQ ID NO: 566 - protein, 1173 aa, Artificial Sequence
  Synthetic Peptide
MAPKKKRKVGIHGVPAAAIRSIKLKMKTNSGTDSIYLRKALWRTHQLINEGIAYYMNLLTLYRQEAIGDKTKEAYQAELINIIRNQQRNNGSSEEHGSDQEILALLRQLYELIIPSSIGESGDANQLGNKFLYPLVDPNSQSGKGTSNAGRKPRWKRLKEEGNPDWELEKKKDEERKAKDPTVKIFDNLNKYGLLPLFPLFTNIQKDIEWLPLGKRQSVRKWDKDMFIQAIERLLSWESWNRRVADEYKQLKEKTESYYKEHLTGGEEWIEKIRKFEKERNMELEKNAFAPNDGYFITSRQIRGWDRVYEKWSKLPESASPEELWKVVAEQQNKMSEGFGDPKVFSFLANRENRDIWRGHSERIYHIAAYNGLQKKLSRTKEQATFTLPDAIEHPLWIRYESPGGTNLNLFKLEEKQKKNYYVTLSKIIWPSEEKWIEKENIEIPLAPSIQFNRQIKLKQHVKGKQEISFSDYSSRISLDGVLGGSRIQFNRKYIKNHKELLGEGDIGPVFFNLVVDVAPLQETRNGRLQSPIGKALKVISSDFSKVIDYKPKELMDWMNTGSASNSFGVASLLEGMRVMSIDMGQRTSASVSIFEVVKELPKDQEQKLFYSINDTELFAIHKRSFLLNLPGEVVTKNNKQQRQERRKKRQFVRSQIRMLANVLRLETKKTPDERKKAIHKLMEIVQSYDSWTASQKEVWEKELNLLTNMAAFNDEIWKESLVELHHRIEPYVGQIVSKWRKGLSEGRKNLAGISMWNIDELEDTRRLLISWSKRSRTPGEANRIETDEPFGSSLLQHIQNVKDDRLKQMANLIIMTALGFKYDKEEKDRYKRWKETYPACQIILFENLNRYLFNLDRSRRENSRLMKWAHRSIPRTVSMQGEMFGLQVGDVRSEYSSRFHAKTGAPGIRCHALTEEDLKAGSNTLKRLIEDGFINESELAYLKKGDIIPSQGGELFVTLSKRYKKDSDNNELTVIHADINAAQNLQKRFWQQNSEVYRVPCQLARMGEDKLYIPKSQTETIKKYFGKGSFVKNNTEQEVYKWEKSEKMKIKTDTTFDLQDLDGFEDISKTIELAQEQQKKYLTMFRDPSGYFFNNETWRPQKEYWSIVNNIIKSCLKKKILSNKVELKRPAATKKAGQAKKKKGSYPYDVPDYAYPYDVPDYAYPYDVPDYA

SEQ ID NO: 567 - RNA, 127 nt, Artificial Sequence
  Synthetic Oligonucleotide
  misc_feature (105)..(127): n = any nucleotide
gaccuauagggucaaugaaucugugcgugugccauaaguaauuaaaaauuacccaccacaggauuaucuuauuucugcaaaagcagaaauaagaugauuggcacnnnnnnnnnnnnnnnnnnnnnnn

SEQ ID NO: 568 - RNA, 130 nt, Artificial Sequence
  Synthetic Oligonucleotide
  misc_feature (108)..(130): n = any nucleotide
ggugaccuauagggucaaugaaucugugcgugugccauaaguaauuaaaaauuacccaccacaggauuaucuuauuucugcaaaagcagaaauaagaugauuggcacnnnnnnnnnnnnnnnnnnnnnnn

SEQ ID NO: 569 - RNA, 124 nt, Artificial Sequence
  Synthetic Oligonucleotide
  misc_feature (102)..(124): n = any nucleotide
cuauagggucaaugaaucugugcgugugccauaaguaauuaaaaauuacccaccacaggauuaucuuauuucugcaaaagcagaaauaagaugauuggcacnnnnnnnnnnnnnnnnnnnnnnn

SEQ ID NO: 570 - RNA, 111 nt, Artificial Sequence
  Synthetic Oligonucleotide
  misc_feature (89)..(111): n = any nucleotide
gaccuauagggucaaugaaucugugcgugugccauaaguaauuaaaaauuacccaccacaggaucaucuuaaaaaagaugauuggcacnnnnnnnnnnnnnnnnnnnnnnn

SEQ ID NO: 571 - RNA, 121 nt, Artificial Sequence
  Synthetic Oligonucleotide
  misc_feature (99)..(121): n = any nucleotide
gaccuauagggucaaugaaucugugcgugugccauaaguaauuaaaaauuacccaccacaggaucaucuuauuucaaaagaaauaagaugauuggcacnnnnnnnnnnnnnnnnnnnnnnn

SEQ ID NO: 572 - RNA, 111 nt, Artificial Sequence
  Synthetic Oligonucleotide
  misc_feature (89)..(111): n = any nucleotide
gaccuauagggucaaugaaucugugcgugugccauaaguaauuaaaaauuacccaccacaggagcaccugaaaacaggugcuuggcacnnnnnnnnnnnnnnnnnnnnnnn

SEQ ID NO: 573 - DNA, 23 bp, Artificial Sequence
  Synthetic Oligonucleotide
cccttcagctaaaataaaggagg

SEQ ID NO: 574 - DNA, 23 bp, Artificial Sequence
  Synthetic Oligonucleotide
ggctcagcaggcacctgcctcag

SEQ ID NO: 575 - DNA, 23 bp, Artificial Sequence
  Synthetic Oligonucleotide
acgtactgatgttaacagctgac

SEQ ID NO: 576 - DNA, 23 bp, Artificial Sequence
  Synthetic Oligonucleotide
gggactggagttgcttcatgtac

SEQ ID NO: 577 - DNA, 23 bp, Artificial Sequence
  Synthetic Oligonucleotide
ctgacctcccaaacagctacata

SEQ ID NO: 578 - DNA, 23 bp, Artificial Sequence
  Synthetic Oligonucleotide
ttcatggagaaaatattcagaat

SEQ ID NO: 579 - DNA, 23 bp, Artificial Sequence
  Synthetic Oligonucleotide
tctccatgaaaaatactggggtc

SEQ ID NO: 580 - DNA, 9041 bp, Bacillus species
agaacatgtgagcaaaaggccagcaaaaggccaggaaccgtaaaaaggccgcgttgctggcgtttttccataggctccgcccccctgacgagcatcacaaaaatcgacgctcaagtcagaggtggcgaaacccgacaggactataaagataccaggcgtttccccctggaagctccctcgtgcgctctcctgttccgaccctgccgcttaccggatacctgtccgcctttctcccttcgggaagcgtggcgctttctcatagctcacgctgtaggtatctcagttcggtgtaggtcgttcgctccaagctgggctgtgtgcacgaaccccccgttcagcccgaccgctgcgccttatccggtaactatcgtcttgagtccaacccggtaagacacgacttatcgccactggcagcagccactggtaacaggattagcagagcgaggtatgtaggcggtgctacagagttcttgaagtggtggcctaactacggctacactagaagaacagtatttggtatctgcgctctgctgaagccagttaccttcggaaaaagagttggtagctcttgatccggcaaacaaaccaccgctggtagcggtggtttttttgtttgcaagcagcagattacgcgcagaaaaaaaggatctcaagaagatcctttgatcttttctacggggtctgacgctcagtggaacgaaaactcacgttaagggattttggtcatgagattatcaaaaaggatcttcacctagatccttttaaattaaaaatgaagttttaaatcaatctaaagtatatatgagtaaacttggtctgacagttaccaatgcttaatcagtgaggcacctatctcagcgatctgtctatttcgttcatccatagttgcctgactccccgtcgtgtagataactacgatacgggagggcttaccatctggccccagtgctgcaatgataccgcgagacccacgctcaccggctccagatttatcagcaataaaccagccagccggaagggccgagcgcagaagtggtcctgcaactttatccgcctccatccagtctattaattgttgccgggaagctagagtaagtagttcgccagttaatagtttgcgcaacgttgttgccattgctacaggcatcgtggtgtcacgctcgtcgtttggtatggcttcattcagctccggttcccaacgatcaaggcgagttacatgatcccccatgttgtgcaaaaaagcggttagctccttcggtcctccgatcgttgtcagaagtaagttggccgcagtgttatcactcatggttatggcagcactgcataattctcttactgtcatgccatccgtaagatgcttttctgtgactggtgagtactcaaccaagtcattctgagaatagtgtatgcggcgaccgagttgctcttgcccggcgtcaatacgggataataccgcgccacatagcagaactttaaaagtgctcatcattggaaaacgttcttcggggcgaaaactctcaaggatcttaccgctgttgagatccagttcgatgtaacccactcgtgcacccaactgatcttcagcatcttttactttcaccagcgtttctgggtgagcaaaaacaggaaggcaaaatgccgcaaaaaagggaataagggcgacacggaaatgttgaatactcatactcttcctttttcaatattattgaagcatttatcagggttattgtctcatgagcggatacatatttgaatgtatttagaaaaataaacaaataggggttccgcgcacatttccccgaaaagtgccacctgacgtcgacggatcgggagatctcccgatcccctatggtgcactctcagtacaatctgctctgatgccgcatagttaagccagtatctgctccctgcttgtgtgttggaggtcgctgagtagtgcgcgagcaaaatttaagctacaacaaggcaaggcttgaccgacaattgcatgaagaatctgcttagggttaggcgttttgcgctgcttcgcgatgtacgggccagatatacgcgttgacattgattattgactagttattaatagtaatcaattacggggtcattagttcatagcccatatatggagttccgcgttacataacttacggtaaatggcccgcctggctgaccgcccaacgacccccgcccattgacgtcaataatgacgtatgttcccatagtaacgccaatagggactttccattgacgtcaatgggtggagtatttacggtaaactgcccacttggcagtacatcaagtgtatcatatgccaagtacgccccctattgacgtcaatgacggtaaatggcccgcctggcattatgcccagtacatgaccttatgggactttcctacttggcagtacatctacgtattagtcatcgctattaccatggtgatgcggttttggcagtacatcaatgggcgtggatagcggtttgactcacggggatttccaagtctccaccccattgacgtcaatgggagtttgttttggcaccaaaatcaacgggactttccaaaatgtcgtaacaactccgccccattgacgcaaatgggcggtaggcgtgtacggtgggaggtctatataagcagagctctctggctaactagagaacccactgcttactggcttatcgaaattaatacgactcactatagggagacccaagctggctagcgtttaaacttaagcttgccaccatggccccaaagaagaagcggaaggtcggtatccacggagtcccagcagccggatccgccgtgaagtccatcaaagtgaagctgcggctgagcgagtgccccgatattctggctggaatgtggcagctgcacagagccacaaatgccggcgtgcggtactacacagaatgggtgtccctgatgcggcaagagatcctgtacagcagaggccctgatggcggccagcagtgttatatgaccgccgaggattgccagagagagctgctgcggagactgcggaatagacagctgcataacggccggcaggatcagcctggaacagatgctgatctgctggccatcagcagacggctgtacgagattctggtgctgcagagcatcggcaaaagaggcgacgcccagcagattgccagcagctttctgagccctctggtggaccccaacagcaaaggtggaagaggcgaggccaagagcggaagaaaacctgcctggcagaagatgcgcgaccagggcgatcctagatgggttgccgctagagagaagtacgagcagcggaaggccgtggatcccagcaaagagattctgaacagcctggacgccctgggcctcagacctctgtttgccgtgttcaccgagacatacagatccggcgtggactggaagcctctgggcaaatctcagggcgtcagaacctgggacagagacatgtttcagcaggccctggaacggctgatgagctgggagagctggaatcggagagtgggcgaagagtacgccagactgttccagcagaaaatgaagttcgagcaagagcacttcgccgagcagagccacctggtcaaactggctagagccctggaagccgatatgagagccgcctctcagggcttcgaggccaaaagaggaacagcccaccagatcaccagaagggcactgagaggggccgacagagtgttcgagatctggaagtctatccccgaggaagccctgttcagccagtacgacgaagtgatcagacaggtgcaggccgagaagcggagagatttcggcagccatgacctgttcgccaagctggccgagcctaagtatcagcccctttggagagccgacgagacattcctgaccagatacgccctgtacaacggcgtgctgcgcgatctggaaaaggccagacagttcgccaccttcacactgcctgatgcctgcgtgaaccccatctggaccagattcgagtctagccagggcagcaacctgcacaaatacgagtttctgttcgaccacctcggacctggcagacacgccgtcagatttcagagactgctggtggtggaaagcgagggcgccaaagaaagggatagcgtggtggtgcctgtggctccttctggccaactggataagctggtgctgagggaagaagagaagtccagcgtcgccctgcatctgcacgataccgctagacccgatggcttcatggctgaatgggctggcgccaaactgcagtacgagagaagcaccctggccagaaaagccagacgggacaagcagggcatgagaagctggcggagacagccctccatgctgatgtctgccgctcagatgctggaagatgccaaacaggctggcgacgtgtacctgaacatcagcgtgcgcgtgaagtctcccagtgaagtgcgaggacagaggcggcctccttacgccgctctgtttagaatcgacgacaagcagcggagagtgaccgtgaactacaacaagctgagcgcctacctggaagaacaccccgataagcagatccctggcgctcctggactgctgtctggactgagagtgatgtccgtggacctgggcctgagaacaagcgccagcatctccgtgttcagagtggccaagaaagaagaggtggaagccctcggagatggccggcctcctcactactatcctatccacggcaccgatgacctggtggccgtgcacgaaagatcccacctgattcagatgcccggcgaaaccgagacaaagcagctgcggaagctgagagaagaacggcaggccgtgctgaggccactgtttgctcaactggcactgctgagactgctcgtcagatgtggcgccgctgacgagagaatcagaaccagatcctggcagcggctgaccaagcagggaagagagttcaccaagagactgacccctagctggcgcgaggctctggaactggaactgacaagactcgaggcctactgcggcagagtgcccgatgatgagtggtccagaatcgtggacagaaccgtgattgccctgtggcggagaatgggcaagcaagtgcgcgattggcggaagcaagtgaagtccggggccaaagtgaaagtgaagggctaccagctggatgtcgtcggcggaaattctctggcccagatcgactatctggaacagcagtacaagttcctgcggcgttggagcttcttcgccagagcttctggcctggtcgtgcgggccgatagagaaagccattttgccgtggctctgagacagcacatcgagaacgccaagcgggacagactgaagaaactggccgaccggatcctgatggaagcactgggctatgtgtacgaggccagcggacctagagaaggccagtggacagctcagcaccctccttgccagctgatcattctcgaggaactgtccgcctaccggttcagcgacgatagacctcctagcgagaacagcaaactgatggcctggggccacagaggcatcctcgaagaactggtcaaccaggctcaggtgcacgatgtgctcgtgggcacagtgtacgccgccttcagcagcagattcgacgctagaacaggtgctcccggcgtcagatgcagaagagtgcctgccagatttgtgggcgccaccgtggatgattctctgccactgtggctgaccgagttcctggacaagcaccggctggataagaacctgctgcggcccgacgatgtgatcccaacaggcgaaggcgaattcctggtgtccccttgtggcgaagaggctgccagagttagacaggttcacgccgacatcaacgctgcccagaacctgcagagaaggctgtggcagaacttcgacatcaccgagctgaggctgagatgcgacgtgaagatgggcggagagggaacagtgctggtgcccagagtgaacaacgccagagccaagcagctgttcggcaagaaggtgctggtttcccaggacggcgtgaccttcttcgagagatctcagacaggcggcaagccccacagcgagaagcagaccgatctgaccgacaaagaactcgagctgatcgccgaggccgatgaggccagagctaaaagcgtggtgctgttcagggatcctagcggccacattggcaaaggccactggatccggcagcgcgagttttggagtctggtcaagcagaggatcgagagccacaccgccgagcggattagagttagaggcgtgggaagctccctggacggatccaaaaggccggcggccacgaaaaaggccggccaggcaaaaaagaaaaagggatcttacccatacgatgttccagattacgcttatccctacgacgtgcctgattatgcatacccatatgatgtccccgactatgcctaagaattctgcagatatccagcacagtggcggccgctcgagtctagagggcccgtttaaacccgctgatcagcctcgactgtgccttctagttgccagccatctgttgtttgcccctcccccgtgccttccttgaccctggaaggtgccactcccactgtcctttcctaataaaatgaggaaattgcatcgcattgtctgagtaggtgtcattctattctggggggtggggtggggcaggacagcaagggggaggattgggaagacaatagcaggcatgctggggatgcggtgggctctatggcttctgaggcggaaagaaccagctggggctctagggggtatccccacgcgccctgtagcggcgcattaagcgcggcgggtgtggtggttacgcgcagcgtgaccgctacacttgccagcgccctagcgcccgctcctttcgctttcttcccttcctttctcgccacgttcgccggctttccccgtcaagctctaaatcgggggctccctttagggttccgatttagtgctttacggcacctcgaccccaaaaaacttgattagggtgatggttcacgtagtgggccatcgccctgatagacggtttttcgccctttgacgttggagtccacgttctttaatagtggactcttgttccaaactggaacaacactcaaccctatctcggtctattcttttgatttataagggattttgccgatttcggcctattggttaaaaaatgagctgatttaacaaaaatttaacgcgaattaattctgtggaatgtgtgtcagttagggtgtggaaagtccccaggctccccagcaggcagaagtatgcaaagcatgcatctcaattagtcagcaaccaggtgtggaaagtccccaggctccccagcaggcagaagtatgcaaagcatgcatctcaattagtcagcaaccatagtcccgcccctaactccgcccatcccgcccctaactccgcccagttccgcccattctccgccccatggctgactaattttttttatttatgcagaggccgaggccgcctctgcctctgagctattccagaagtagtgaggaggcttttttggaggcctaggcttttgcaaaaagctcccgggagcttgtatatccattttcggatctgatcaagagacaggatgaggatcgtttcgcatgattgaacaagatggattgcacgcaggttctccggccgcttgggtggagaggctattcggctatgactgggcacaacagacaatcggctgctctgatgccgccgtgttccggctgtcagcgcaggggcgcccggttctttttgtcaagaccgacctgtccggtgccctgaatgaactgcaggacgaggcagcgcggctatcgtggctggccacgacgggcgttccttgcgcagctgtgctcgacgttgtcactgaagcgggaagggactggctgctattgggcgaagtgccggggcaggatctcctgtcatctcaccttgctcctgccgagaaagtatccatcatggctgatgcaatgcggcggctgcatacgcttgatccggctacctgcccattcgaccaccaagcgaaacatcgcatcgagcgagcacgtactcggatggaagccggtcttgtcgatcaggatgatctggacgaagagcatcaggggctcgcgccagccgaactgttcgccaggctcaaggcgcgcatgcccgacggcgaggatctcgtcgtgacccatggcgatgcctgcttgccgaatatcatggtggaaaatggccgcttttctggattcatcgactgtggccggctgggtgtggcggaccgctatcaggacatagcgttggctacccgtgatattgctgaagagcttggcggcgaatgggctgaccgcttcctcgtgctttacggtatcgccgctcccgattcgcagcgcatcgccttctatcgccttcttgacgagttcttctgagcgggactctggggttcgaaatgaccgaccaagcgacgcccaacctgccatcacgagatttcgattccaccgccgccttctatgaaaggttgggcttcggaatcgttttccgggacgccggctggatgatcctccagcgcggggatctcatgctggagttcttcgcccaccccaacttgtttattgcagcttataatggttacaaataaagcaatagcatcacaaatttcacaaataaagcatttttttcactgcattctagttgtggtttgtccaaactcatcaatgtatcttatcatgtctgtataccgtcgacctctagctagagcttggcgtaatcatggtcatagctgtttcctgtgtgaaattgttatccgctcacaattccacacaacatacgagccggaagcataaagtgtaaagcctggggtgcctaatgagtgagctaactcacattaattgcgttgcgctcactgcccgctttccagtcgggaaacctgtcgtgccagctgcattaatgaatcggccaacgcgcggggagaggcggtttgcgtattgggcgctcttccgcttcctcgctcactgactcgctgcgctcggtcgttcggctgcggcgagcggtatcagctcactcaaaggcggtaatacggttatccacagaatcaggggataacgcaggaa

SEQ ID NO: 581 - DNA, 8924 bp, Bacillus hisashii
agaacatgtgagcaaaaggccagcaaaaggccaggaaccgtaaaaaggccgcgttgctggcgtttttccataggctccgcccccctgacgagcatcacaaaaatcgacgctcaagtcagaggtggcgaaacccgacaggactataaagataccaggcgtttccccctggaagctccctcgtgcgctctcctgttccgaccctgccgcttaccggatacctgtccgcctttctcccttcgggaagcgtggcgctttctcatagctcacgctgtaggtatctcagttcggtgtaggtcgttcgctccaagctgggctgtgtgcacgaaccccccgttcagcccgaccgctgcgccttatccggtaactatcgtcttgagtccaacccggtaagacacgacttatcgccactggcagcagccactggtaacaggattagcagagcgaggtatgtaggcggtgctacagagttcttgaagtggtggcctaactacggctacactagaagaacagtatttggtatctgcgctctgctgaagccagttaccttcggaaaaagagttggtagctcttgatccggcaaacaaaccaccgctggtagcggtggtttttttgtttgcaagcagcagattacgcgcagaaaaaaaggatctcaagaagatcctttgatcttttctacggggtctgacgctcagtggaacgaaaactcacgttaagggattttggtcatgagattatcaaaaaggatcttcacctagatccttttaaattaaaaatgaagttttaaatcaatctaaagtatatatgagtaaacttggtctgacagttaccaatgcttaatcagtgaggcacctatctcagcgatctgtctatttcgttcatccatagttgcctgactccccgtcgtgtagataactacgatacgggagggcttaccatctggccccagtgctgcaatgataccgcgagacccacgctcaccggctccagatttatcagcaataaaccagccagccggaagggccgagcgcagaagtggtcctgcaactttatccgcctccatccagtctattaattgttgccgggaagctagagtaagtagttcgccagttaatagtttgcgcaacgttgttgccattgctacaggcatcgtggtgtcacgctcgtcgtttggtatggcttcattcagctccggttcccaacgatcaaggcgagttacatgatcccccatgttgtgcaaaaaagcggttagctccttcggtcctccgatcgttgtcagaagtaagttggccgcagtgttatcactcatggttatggcagcactgcataattctcttactgtcatgccatccgtaagatgcttttctgtgactggtgagtactcaaccaagtcattctgagaatagtgtatgcggcgaccgagttgctcttgcccggcgtcaatacgggataataccgcgccacatagcagaactttaaaagtgctcatcattggaaaacgttcttcggggcgaaaactctcaaggatcttaccgctgttgagatccagttcgatgtaacccactcgtgcacccaactgatcttcagcatcttttactttcaccagcgtttctgggtgagcaaaaacaggaaggcaaaatgccgcaaaaaagggaataagggcgacacggaaatgttgaatactcatactcttcctttttcaatattattgaagcatttatcagggttattgtctcatgagcggatacatatttgaatgtatttagaaaaataaacaaataggggttccgcgcacatttccccgaaaagtgccacctgacgtcgacggatcgggagatctcccgatcccctatggtgcactctcagtacaatctgctctgatgccgcatagttaagccagtatctgctccctgcttgtgtgttggaggtcgctgagtagtgcgcgagcaaaatttaagctacaacaaggcaaggcttgaccgacaattgcatgaagaatctgcttagggttaggcgttttgcgctgcttcgcgatgtacgggccagatatacgcgttgacattgattattgactagttattaatagtaatcaattacggggtcattagttcatagcccatatatggagttccgcgttacataacttacggtaaatggcccgcctggctgaccgcccaacgacccccgcccattgacgtcaataatgacgtatgttcccatagtaacgccaatagggactttccattgacgtcaatgggtggagtatttacggtaaactgcccacttggcagtacatcaagtgtatcatatgccaagtacgccccctattgacgtcaatgacggtaaatggcccgcctggcattatgcccagtacatgaccttatgggactttcctacttggcagtacatctacgtattagtcatcgctattaccatggtgatgcggttttggcagtacatcaatgggcgtggatagcggtttgactcacggggatttccaagtctccaccccattgacgtcaatgggagtttgttttggcaccaaaatcaacgggactttccaaaatgtcgtaacaactccgccccattgacgcaaatgggcggtaggcgtgtacggtgggaggtctatataagcagagctctctggctaactagagaacccactgcttactggcttatcgaaattaatacgactcactatagggagacccaagctggctagcgtttaaacttaagcttgccaccatggccccaaagaagaagcggaaggtcggtatccacggagtcccagcagccggatccgccaccagatccttcatcctgaagatcgagcccaacgaggaagtgaagaaaggcctctggaaaacccacgaggtgctgaaccacggaatcgcctactacatgaatatcctgaagctgatccggcaagaggccatctacgagcaccacgagcaggaccccaagaatcccaagaaggtgtccaaggccgagatccaggccgagctgtgggatttcgtgctgaagatgcagaagtgcaacagcttcacacacgaggtggacaaggacgaggtgttcaacatcctgagagagctgtacgaggaactggtgcccagcagcgtggaaaagaagggcgaagccaaccagctgagcaacaagtttctgtaccctctggtggaccccaacagccagtctggaaagggaacagccagcagcggcagaaagcccagatggtacaacctgaagattgccggcgatccctcctgggaagaagagaagaagaagtgggaagaagataagaaaaaggacccgctggccaagatcctgggcaagctggctgagtacggactgatccctctgttcatcccctacaccgacagcaacgagcccatcgtgaaagaaatcaagtggatggaaaagtcccggaaccagagcgtgcggcggctggataaggacatgttcattcaggccctggaacggttcctgagctgggagagctggaacctgaaagtgaaagaggaatacgagaaggtcgagaaagagtacaagaccctggaagagaggatcaaagaggacatccaggctctgaaggctctggaacagtatgagaaagagcggcaagaacagctgctgcgggacaccctgaacaccaacgagtaccggctgagcaagagaggccttagaggctggcgggaaatcatccagaaatggctgaaaatggacgagaacgagccctccgagaagtacctggaagtgttcaaggactaccagcggaagcaccctagagaggccggcgattacagcgtgtacgagttcctgtccaagaaagagaaccacttcatctggcggaatcaccctgagtacccctacctgtacgccaccttctgcgagatcgacaagaaaaagaaggacgccaagcagcaggccaccttcacactggccgatcctatcaatcaccctctgtgggtccgattcgaggaaagaagcggcagcaacctgaacaagtacagaatcctgaccgagcagctgcacaccgagaagctgaagaaaaagctgacagtgcagctggaccggctgatctaccctacagaatctggcggctgggaagagaagggcaaagtggacattgtgctgctgcccagccggcagttctacaaccagatcttcctggacatcgaggaaaagggcaagcacgccttcacctacaaggatgagagcatcaagttccctctgaagggcacactcggcggagccagagtgcagttcgacagagatcacctgagaagataccctcacaaggtggaaagcggcaacgtgggcagaatctacttcaacatgaccgtgaacatcgagcctacagagtccccagtgtccaagtctctgaagatccaccgggacgacttccccaaggtggtcaacttcaagcccaaagaactgaccgagtggatcaaggacagcaagggcaagaaactgaagtccggcatcgagtccctggaaatcggcctgagagtgatgagcatcgacctgggacagagacaggccgctgccgcctctattttcgaggtggtggatcagaagcccgacatcgaaggcaagctgtttttcccaatcaagggcaccgagctgtatgccgtgcacagagccagcttcaacatcaagctgcccggcgagacactggtcaagagcagagaagtgctgcggaaggccagagaggacaatctgaaactgatgaaccagaagctcaacttcctgcggaacgtgctgcacttccagcagttcgaggacatcaccgagagagagaagcgggtcaccaagtggatcagcagacaagagaacagcgacgtgcccctggtgtaccaggatgagctgatccagatccgcgagctgatgtacaagccttacaaggactgggtcgccttcctgaagcagctccacaagagactggaagtcgagatcggcaaagaagtgaagcactggcggaagtccctgagcgacggaagaaagggcctgtacggcatctccctgaagaacatcgacgagatcgatcggacccggaagttcctgctgagatggtccctgaggcctaccgaacctggcgaagtgcgtagactggaacccggccagagattcgccatcgaccagctgaatcacctgaacgccctgaaagaagatcggctgaagaagatggccaacaccatcatcatgcacgccctgggctactgctacgacgtgcggaagaagaaatggcaggctaagaaccccgcctgccagatcatcctgttcgaggatctgagcaactacaacccctacgaggaaaggtcccgcttcgagaacagcaagctcatgaagtggtccagacgcgagatccccagacaggttgcactgcagggcgagatctatggcctgcaagtgggagaagtgggcgctcagttcagcagcagattccacgccaagacaggcagccctggcatcagatgtagcgtcgtgaccaaagagaagctgcaggacaatcggttcttcaagaatctgcagagagagggcagactgaccctggacaaaatcgccgtgctgaaagagggcgatctgtacccagacaaaggcggcgagaagttcatcagcctgagcaaggatcggaagtgcgtgaccacacacgccgacatcaacgccgctcagaacctgcagaagcggttctggacaagaacccacggcttctacaaggtgtactgcaaggcctaccaggtggacggccagaccgtgtacatccctgagagcaaggaccagaagcagaagatcatcgaagagttcggcgagggctacttcattctgaaggacggggtgtacgaatgggtcaacgccggcaagctgaaaatcaagaagggcagctccaagcagagcagcagcgagctggtggatagcgacatcctgaaagacagcttcgacctggcctccgagctgaaaggcgaaaagctgatgctgtacagggaccccagcggcaatgtgttccccagcgacaaatggatggccgctggcgtgttcttcggaaagctggaacgcatcctgatcagcaagctgaccaaccagtactccatcagcaccatcgaggacgacagcagcaagcagtctatgggatccaaaaggccggcggccacgaaaaaggccggccaggcaaaaaagaaaaagggatcttacccatacgatgttccagattacgcttatccctacgacgtgcctgattatgcatacccatatgatgtccccgactatgcctaagaattctgcagatatccagcacagtggcggccgctcgagtctagagggcccgtttaaacccgctgatcagcctcgactgtgccttctagttgccagccatctgttgtttgcccctcccccgtgccttccttgaccctggaaggtgccactcccactgtcctttcctaataaaatgaggaaattgcatcgcattgtctgagtaggtgtcattctattctggggggtggggtggggcaggacagcaagggggaggattgggaagacaatagcaggcatgctggggatgcggtgggctctatggcttctgaggcggaaagaaccagctggggctctagggggtatccccacgcgccctgtagcggcgcattaagcgcggcgggtgtggtggttacgcgcagcgtgaccgctacacttgccagcgccctagcgcccgctcctttcgctttcttcccttcctttctcgccacgttcgccggctttccccgtcaagctctaaatcgggggctccctttagggttccgatttagtgctttacggcacctcgaccccaaaaaacttgattagggtgatggttcacgtagtgggccatcgccctgatagacggtttttcgccctttgacgttggagtccacgttctttaatagtggactcttgttccaaactggaacaacactcaaccctatctcggtctattcttttgatttataagggattttgccgatttcggcctattggttaaaaaatgagctgatttaacaaaaatttaacgcgaattaattctgtggaatgtgtgtcagttagggtgtggaaagtccccaggctccccagcaggcagaagtatgcaaagcatgcatctcaattagtcagcaaccaggtgtggaaagtccccaggctccccagcaggcagaagtatgcaaagcatgcatctcaattagtcagcaaccatagtcccgcccctaactccgcccatcccgcccctaactccgcccagttccgcccattctccgccccatggctgactaattttttttatttatgcagaggccgaggccgcctctgcctctgagctattccagaagtagtgaggaggcttttttggaggcctaggcttttgcaaaaagctcccgggagcttgtatatccattttcggatctgatcaagagacaggatgaggatcgtttcgcatgattgaacaagatggattgcacgcaggttctccggccgcttgggtggagaggctattcggctatgactgggcacaacagacaatcggctgctctgatgccgccgtgttccggctgtcagcgcaggggcgcccggttctttttgtcaagaccgacctgtccggtgccctgaatgaactgcaggacgaggcagcgcggctatcgtggctggccacgacgggcgttccttgcgcagctgtgctcgacgttgtcactgaagcgggaagggactggctgctattgggcgaagtgccggggcaggatctcctgtcatctcaccttgctcctgccgagaaagtatccatcatggctgatgcaatgcggcggctgcatacgcttgatccggctacctgcccattcgaccaccaagcgaaacatcgcatcgagcgagcacgtactcggatggaagccggtcttgtcgatcaggatgatctggacgaagagcatcaggggctcgcgccagccgaactgttcgccaggctcaaggcgcgcatgcccgacggcgaggatctcgtcgtgacccatggcgatgcctgcttgccgaatatcatggtggaaaatggccgcttttctggattcatcgactgtggccggctgggtgtggcggaccgctatcaggacatagcgttggctacccgtgatattgctgaagagcttggcggcgaatgggctgaccgcttcctcgtgctttacggtatcgccgctcccgattcgcagcgcatcgccttctatcgccttcttgacgagttcttctgagcgggactctggggttcgaaatgaccgaccaagcgacgcccaacctgccatcacgagatttcgattccaccgccgccttctatgaaaggttgggcttcggaatcgttttccgggacgccggctggatgatcctccagcgcggggatctcatgctggagttcttcgcccaccccaacttgtttattgcagcttataatggttacaaataaagcaatagcatcacaaatttcacaaataaagcatttttttcactgcattctagttgtggtttgtccaaactcatcaatgtatcttatcatgtctgtataccgtcgacctctagctagagcttggcgtaatcatggtcatagctgtttcctgtgtgaaattgttatccgctcacaattccacacaacatacgagccggaagcataaagtgtaaagcctggggtgcctaatgagtgagctaactcacattaattgcgttgcgctcactgcccgctttccagtcgggaaacctgtcgtgccagctgcattaatgaatcggccaacgcgcggggagaggcggtttgcgtattgggcgctcttccgcttcctcgctcactgactcgctgcgctcggtcgttcggctgcggcgagcggtatcagctcactcaaaggcggtaatacggttatccacagaatcaggggataacgcaggaa

SEQ ID NO: 582 - DNA, 9692 bp, Unknown
  Member of the phylum Elusimicrobia
agaacatgtgagcaaaaggccagcaaaaggccaggaaccgtaaaaaggccgcgttgctggcgtttttccataggctccgcccccctgacgagcatcacaaaaatcgacgctcaagtcagaggtggcgaaacccgacaggactataaagataccaggcgtttccccctggaagctccctcgtgcgctctcctgttccgaccctgccgcttaccggatacctgtccgcctttctcccttcgggaagcgtggcgctttctcatagctcacgctgtaggtatctcagttcggtgtaggtcgttcgctccaagctgggctgtgtgcacgaaccccccgttcagcccgaccgctgcgccttatccggtaactatcgtcttgagtccaacccggtaagacacgacttatcgccactggcagcagccactggtaacaggattagcagagcgaggtatgtaggcggtgctacagagttcttgaagtggtggcctaactacggctacactagaagaacagtatttggtatctgcgctctgctgaagccagttaccttcggaaaaagagttggtagctcttgatccggcaaacaaaccaccgctggtagcggtggtttttttgtttgcaagcagcagattacgcgcagaaaaaaaggatctcaagaagatcctttgatcttttctacggggtctgacgctcagtggaacgaaaactcacgttaagggattttggtcatgagattatcaaaaaggatcttcacctagatccttttaaattaaaaatgaagttttaaatcaatctaaagtatatatgagtaaacttggtctgacagttaccaatgcttaatcagtgaggcacctatctcagcgatctgtctatttcgttcatccatagttgcctgactccccgtcgtgtagataactacgatacgggagggcttaccatctggccccagtgctgcaatgataccgcgagacccacgctcaccggctccagatttatcagcaataaaccagccagccggaagggccgagcgcagaagtggtcctgcaactttatccgcctccatccagtctattaattgttgccgggaagctagagtaagtagttcgccagttaatagtttgcgcaacgttgttgccattgctacaggcatcgtggtgtcacgctcgtcgtttggtatggcttcattcagctccggttcccaacgatcaaggcgagttacatgatcccccatgttgtgcaaaaaagcggttagctccttcggtcctccgatcgttgtcagaagtaagttggccgcagtgttatcactcatggttatggcagcactgcataattctcttactgtcatgccatccgtaagatgcttttctgtgactggtgagtactcaaccaagtcattctgagaatagtgtatgcggcgaccgagttgctcttgcccggcgtcaatacgggataataccgcgccacatagcagaactttaaaagtgctcatcattggaaaacgttcttcggggcgaaaactctcaaggatcttaccgctgttgagatccagttcgatgtaacccactcgtgcacccaactgatcttcagcatcttttactttcaccagcgtttctgggtgagcaaaaacaggaaggcaaaatgccgcaaaaaagggaataagggcgacacggaaatgttgaatactcatactcttcctttttcaatattattgaagcatttatcagggttattgtctcatgagcggatacatatttgaatgtatttagaaaaataaacaaataggggttccgcgcacatttccccgaaaagtgccacctgacgtcgacggatcgggagatctcccgatcccctatggtgcactctcagtacaatctgctctgatgccgcatagttaagccagtatctgctccctgcttgtgtgttggaggtcgctgagtagtgcgcgagcaaaatttaagctacaacaaggcaaggcttgaccgacaattgcatgaagaatctgcttagggttaggcgttttgcgctgcttcgcgatgtacgggccagatatacgcgttgacattgattattgactagttattaatagtaatcaattacggggtcattagttcatagcccatatatggagttccgcgttacataacttacggtaaatggcccgcctggctgaccgcccaacgacccccgcccattgacgtcaataatgacgtatgttcccatagtaacgccaatagggactttccattgacgtcaatgggtggagtatttacggtaaactgcccacttggcagtacatcaagtgtatcatatgccaagtacgccccctattgacgtcaatgacggtaaatggcccgcctggcattatgcccagtacatgaccttatgggactttcctacttggcagtacatctacgtattagtcatcgctattaccatggtgatgcggttttggcagtacatcaatgggcgtggatagcggtttgactcacggggatttccaagtctccaccccattgacgtcaatgggagtttgttttggcaccaaaatcaacgggactttccaaaatgtcgtaacaactccgccccattgacgcaaatgggcggtaggcgtgtacggtgggaggtctatataagcagagctctctggctaactagagaacccactgcttactggcttatcgaaattaatacgactcactatagggagacccaagctggctagcgtttaaacttaagcttgccaccatggccccaaagaagaagcggaaggtcggtatccacggagtcccagcagccggatccaaccggatctaccagggcagagtgaccaaggtggaagtgcccgatggcaaggacgagaagggcaacatcaagtggaagaagctggaaaattggagcgacatcctgtggcagcaccacatgctgttccaggacgccgtgaactactacacactggccctggccgccatctctggatctgctgttggcagcgacgagaagtccatcatcctgagagaatgggccgtgcaggtccagaacatctgggagaaagccaagaaaaaggccaccgtgttcgagggcccacagaagagactgaccagcatcctgggccttgagcagaacgccagcttcgacattgccgccaagcacatcctgaggacctctgaggccaagcctgagcagagagctagcgccctgatcagactgctggaagagatcgacaagaaaaaccacaacgtcgtgtgcggcgagcggctgccttttttctgccctcggaacatccagagcaagcggagccctacaagcaaggccgtgtctagcgtgcaagagcagaaacggcaagaggaagtgcggcggttccacaacatgcagcctgaggaagtggtcaagaacgccgtgacactggacatcagcctgttcaagagcagccccaagatcgtgttcctggaagatcccaagaaggccagagccgagctgctgaagcagttcgacaacgcctgcaagaaacacaaagaactcgtgggcatcaagaaagccttcaccgagtccatcgacaagcacggctctagcctgaaggtgccagctcctggctctaagcctagcggcctgtatcctagcgccatcgtgttcaagtacttccccgtggatattaccaagaccgtgtttctgaaggccacagagaagctggccatgggcaaagaccgggaagtgaccaacgatcctatcgccgacgccagagtgaacgacaagccccacttcgactacttcaccaacattgccctgatccgcgagaaagagaagaacagagccgcttggtttgagttcgatctggccgcctttatcgaggccatcatgagccctcacagattctaccaggacacccagaagcggaaagaggccgccagaaagctggaagaaaagatcaaggccatcgaaggcaaaggcgggcagttcaaagagagcgacagcgaggacgacgacgtggactctctgcctggatttgagggcgacaccagaatcgacctgctgcggaagctggtcaccgatacacttggatggctgggcgagagcgagacacccgataacaacgagggcaaaaagaccgagtacagcatcagcgagcggaccctgagaatcttccccgacatccagaagcagtggagcgagctggccgagaaaggcgagacaacagagggaaagctgctcgaagtgctgaaacacgagcagaccgagcaccagagcgatttcggaagcgccacactgtatcagcacctggccaagccagagtttcaccccatctggctgaagtccggcaccgaggaatggcacgccgagaatcctctgaaagcctggctgaactacaaagagctgcagtacgagctgaccgacaagaagcggcccatccactttacccctgctcaccctgtgtacagccccagatacttcgacttccccaagaagtccgaaaccgaagagaaagaggtgtccaagaacacccacagcctgaccacaagcctggccagcgagcacatcaagaactccctgcagtttacagccgggctgatcagaaagaccaacgtgggcaagaaggctatcaaggcccggttcagctacagcgcccctagactgagaagggactgcctgagaagcgagaacaacgagaacctgtacaaggccccttggctccagcctatgatgagagccctgggcatcgacgaggaaaaggccgacagacagaacttcgccaacaccaggatcaccctgatggccaaaggcctggacgacattcagctgggctttcccgtggaagccaacagccaagaactgcagaaagaagtgtctaacggcatcagctggaagggccagttcaactggggaggaatcgcctctctgtctgccctgagatggccccacgagaagaagcccaagaatcctcctgagcagccttggtggggcatcgatagctttagctgcctggccgtggatctgggccagagatatgctggcgccttcgccagactggacgtgtccaccattgagaaaaagggcaagagccggttcatcggcgaggcctgcgacaaaaagtggtacgccaaggtgtcccggatgggcctgttgagacttcctggcgaggacgtgaaagtgtggcgggatgccagcaagattgacaaagagaacggcttcgccttccggaaagagctgttcggcgagaagggaagatccgccacacctctggaagccgaggaaaccgccgagctgatcaagctgtttggagccaacgagaaggacgtgatgcccgacaactggtctaaagagctgagcttccccgagcagaatgacaagctgctgatcgtggctcggagagcccaggctgctgttagcagactgcatagatgggcatggttcttcgacgaggccaagagatccgacgacgccatcagagagattctggaaagcgacgacaccgacctgaagcagaaagtgaacaagaacgagatcgagaaagtcaaagagacaatcatctccctgctgaaagtcaagcaagagctgctgcccacactgctgaccagactggccaatagagtgctgcccctgagaggcagatcctgggagtggaaaaagcaccaccagaagaacgacggcttcatcctggaccagaccggcaaggccatgcctaacgtgctgattagaggacagcggggcctgagcatggaccggatcgagcagattaccgagctgagaaagcggtttcaggccctgaaccagagcctgcggagacagatcggaaagaaggcccctgccaagcgggacgactctatccctgattgctgccccgatctgctggaaaaactggaccacatgaaggaacagcgcgtgaaccagacagcccacatgattctggccgaggcactgggactgaaactggccgagcctcctaaggacaagaaagaactgaacgagacatgcgacatgcacggcgcctacgccaaagtggacaaccccgtgtccttcatcgtgatcgaggacctgagccggtacagaagcagccaaggcagaagccccagagaaaacagccgactgatgaagtggtgccacagggccgtcagagacaagctgaaagaaatgtgcgaggtgttcttcccactgtgcgagagaagaaaggccggctctgcttgggtttccctgcctcctctgcttgaaacaccagccgcctacagcagcagattctgcagcagatctggcgtggccggcttcagagccgtggaagtgattcctggcttcgagctgaagtacccctggtcttggctgaaggataagaaggacaaggccggcaatctggccaaagaagccctgaacatccggaccgtgtctgagcagctgaaggcctttaaccaggacaagcccgagaagcccaggacactgctggtgcctattgccggcggacctatcttcgtgcccatctctgaagtgggcctgtccagcttcggactgaagcctcaggttgtgcaggccgacatcaacgccgccatcaatctgggactcagagccatcagcgaccctcggatttgggagattcaccccagactgcggaccgagaagagagatggcagactgttcgccagagagaaacggaagtacggcgaagagaaggtcgaggtgcagcccagcaagaatgagaaggccaaaaaagtgaaggacgaccggaagcctaactacttcgccgatttcagcggcaaggtggactggggctttggcaacattaagaacgagtccggcctgacactggtgtctggcaaagcactgtggtggaccatcaaccagctgcagtgggagagatgctttgacatcaacaagcggcacatcgaggactggtccaacaagcagaagcaaggatccaaaaggccggcggccacgaaaaaggccggccaggcaaaaaagaaaaagggatcttacccatacgatgttccagattacgcttatccctacgacgtgcctgattatgcatacccatatgatgtccccgactatgcctaagaattctgcagatatccagcacagtggcggccgctcgagtctagagggcccgtttaaacccgctgatcagcctcgactgtgccttctagttgccagccatctgttgtttgcccctcccccgtgccttccttgaccctggaaggtgccactcccactgtcctttcctaataaaatgaggaaattgcatcgcattgtctgagtaggtgtcattctattctggggggtggggtggggcaggacagcaagggggaggattgggaagacaatagcaggcatgctggggatgcggtgggctctatggcttctgaggcggaaagaaccagctggggctctagggggtatccccacgcgccctgtagcggcgcattaagcgcggcgggtgtggtggttacgcgcagcgtgaccgctacacttgccagcgccctagcgcccgctcctttcgctttcttcccttcctttctcgccacgttcgccggctttccccgtcaagctctaaatcgggggctccctttagggttccgatttagtgctttacggcacctcgaccccaaaaaacttgattagggtgatggttcacgtagtgggccatcgccctgatagacggtttttcgccctttgacgttggagtccacgttctttaatagtggactcttgttccaaactggaacaacactcaaccctatctcggtctattcttttgatttataagggattttgccgatttcggcctattggttaaaaaatgagctgatttaacaaaaatttaacgcgaattaattctgtggaatgtgtgtcagttagggtgtggaaagtccccaggctccccagcaggcagaagtatgcaaagcatgcatctcaattagtcagcaaccaggtgtggaaagtccccaggctccccagcaggcagaagtatgcaaagcatgcatctcaattagtcagcaaccatagtcccgcccctaactccgcccatcccgcccctaactccgcccagttccgcccattctccgccccatggctgactaattttttttatttatgcagaggccgaggccgcctctgcctctgagctattccagaagtagtgaggaggcttttttggaggcctaggcttttgcaaaaagctcccgggagcttgtatatccattttcggatctgatcaagagacaggatgaggatcgtttcgcatgattgaacaagatggattgcacgcaggttctccggccgcttgggtggagaggctattcggctatgactgggcacaacagacaatcggctgctctgatgccgccgtgttccggctgtcagcgcaggggcgcccggttctttttgtcaagaccgacctgtccggtgccctgaatgaactgcaggacgaggcagcgcggctatcgtggctggccacgacgggcgttccttgcgcagctgtgctcgacgttgtcactgaagcgggaagggactggctgctattgggcgaagtgccggggcaggatctcctgtcatctcaccttgctcctgccgagaaagtatccatcatggctgatgcaatgcggcggctgcatacgcttgatccggctacctgcccattcgaccaccaagcgaaacatcgcatcgagcgagcacgtactcggatggaagccggtcttgtcgatcaggatgatctggacgaagagcatcaggggctcgcgccagccgaactgttcgccaggctcaaggcgcgcatgcccgacggcgaggatctcgtcgtgacccatggcgatgcctgcttgccgaatatcatggtggaaaatggccgcttttctggattcatcgactgtggccggctgggtgtggcggaccgctatcaggacatagcgttggctacccgtgatattgctgaagagcttggcggcgaatgggctgaccgcttcctcgtgctttacggtatcgccgctcccgattcgcagcgcatcgccttctatcgccttcttgacgagttcttctgagcgggactctggggttcgaaatgaccgaccaagcgacgcccaacctgccatcacgagatttcgattccaccgccgccttctatgaaaggttgggcttcggaatcgttttccgggacgccggctggatgatcctccagcgcggggatctcatgctggagttcttcgcccaccccaacttgtttattgcagcttataatggttacaaataaagcaatagcatcacaaatttcacaaataaagcatttttttcactgcattctagttgtggtttgtccaaactcatcaatgtatcttatcatgtctgtataccgtcgacctctagctagagcttggcgtaatcatggtcatagctgtttcctgtgtgaaattgttatccgctcacaattccacacaacatacgagccggaagcataaagtgtaaagcctggggtgcctaatgagtgagctaactcacattaattgcgttgcgctcactgcccgctttccagtcgggaaacctgtcgtgccagctgcattaatgaatcggccaacgcgcggggagaggcggtttgcgtattgggcgctcttccgcttcctcgctcactgactcgctgcgctcggtcgttcggctgcggcgagcggtatcagctcactcaaaggcggtaatacggttatccacagaatcaggggataacgcaggaa

SEQ ID NO: 583 - DNA, 9041 bp, Alicyclobacillus kakegawensis; identical to SEQ ID NO: 580

SEQ ID NO: 584 - DNA, 7826 bp, Unknown
  Member of the class Phycisphaerae
gacggatcgggagatctcccgatcccctatggtgcactctcagtacaatctgctctgatgccgcatagttaagccagtatctgctccctgcttgtgtgttggaggtcgctgagtagtgcgcgagcaaaatttaagctacaacaaggcaaggcttgaccgacaattgcatgaagaatctgcttagggttaggcgttttgcgctgcttcgcgatgtacgggccagatatacgcgttgacattgattattgactagttattaatagtaatcaattacggggtcattagttcatagcccatatatggagttccgcgttacataacttacggtaaatggcccgcctggctgaccgcccaacgacccccgcccattgacgtcaataatgacgtatgttcccatagtaacgccaatagggactttccattgacgtcaatgggtggagtatttacggtaaactgcccacttggcagtacatcaagtgtatcatatgccaagtacgccccctattgacgtcaatgacggtaaatggcccgcctggcattatgcccagtacatgaccttatgggactttcctacttggcagtacatctacgtattagtcatcgctattaccatggtgatgcggttttggcagtacatcaatgggcgtggatagcggtttgactcacggggatttccaagtctccaccccattgacgtcaatgggagtttgttttggcaccaaaatcaacgggactttccaaaatgtcgtaacaactccgccccattgacgcaaatgggcggtaggcgtgtacggtgggaggtctatataagcagagctctctggctaactagagaacccactgcttactggcttatcgaaattaatacgactcactatagggagacccaagctggctagcgtttaaacttaagcttgccaccatggccccaaagaagaagcggaaggtcggtatccacggagtcccagcagccgccaccaagagctacagagccagaatcctgaccgacagcagactggccgctgctctggatagaacccacgtggtgtttgtggaaagcctgaagcagatgatcaacacctacctgcggatgcagaacggcaagttcggccccgaccacaagaaactggcccagatcatgctgagccggtccaacacatttgcccacggcgtgatggaccagatcaccagagatcagcccaccagcacactggacgaggaatggaccgacctggccagaagaatccacaagacaaccggacctctgttcctgcaagccgagagattcgccaccgtgaagaacagagccatccacaccaagtccagaggcaaagtgatcccatctcctgagacactggccgtgcctgccaagttctggcaccaagtgtgcgatagcgccagcgcctacatcagatccaaccgcgaactgatgcagcagtggcggaaagatagagccgcctggctgaaggacaagaacgagtggcagcagaaacaccccgagttcatgcagttctacaacggcccctaccagaacttcctgaagctgtgcgacgacgacagaatcacctctcagctggctgccgagcagcagcctacagccagcaagaacaacagacccagaaagaccggcaagcgcttcgccagatggcacctgtggtacaagtggctgagcgagaaccccgagatcatcgaatggcggaacaaggcctccgccagcgactttaagaccgtgaccgatgacgtgcggaagcagatcattaccaagtatccccagcagaacaagtacatcacccggctgctggactggctggaagataacaaccccgagctgaaaaccctggaaaacctgcggcggacctacgtgaagaagttcgacagcttcaagcggcctcctacactgaccctgccatctccatacagacacccctactggttcaccatggaactggaccagttttacaagaaggccgacttcgagaacggcaccatccagctgctgctgatcgacgaggacgacgacggcaactggttcttcaactggatgcccgcctctctgaagcccgatcctagactggtgccttcttggagagccgaaaccttcgagacagagggcagattccctccttacctcggcggcaagatcggcaagaagctgagcagacctgctcctaccgacgccgagagaaaggctggaattgccggcgctaagctgatgattaagaacaatcggagcgagctgctgttcaccgtgttcgagcaggactgccctcctagagtgaagtgggccaagaccaagaaccggaagtgccctgccgacaacgcctttagctccgacggcaagaccagaaagcccctgagaatcctgtccatcgacctgggcatcagacacatcggcgccttcgctctgacacagggcaccagaaatgatagcgcctggcagaccgagagcctgaagaagggcatcatcaacagccctagcatccctccactgcggcaagtgcggagacacgactacgacctgaagcggaaaagacggcggcacggcaagcctgtgaagggccagagaagcaacgccaatctgcaggcccacaggaccaacatggcccaggacagattcaagaagggcgcctctgccatcgtgtcactggccagagagcatagcgccgacctgatcctgttcgagaacctgcacagcctgaagttcagcgccttcgacgagcggtggatgaacagacagctgcgggacatgaaccggcggcacatcgtggaactggtgtctgaacaggcccctgagttcggcatcacagtgaaggacgacatcaacccctggatgaccagccggatctgcagcaactgtaacctgcctggcttcaggttcagcatgaagaagaagaacccctaccgcgagaagctgcccagagagaagtgcaccgatttcggctaccctgtgtgggaacctggcggccacctgtttagatgccctcactgcgaccacagagtgaacgccgacattaacgccgctgccaacctggccaacaagttctttggcctcggctactggaacaacggcctgaagtacgatgccgagacaaagaccttcaccgtgcacaccgacaagaaaaccccacctctgatcttcaagcccagacctcagttcgatctgtgggccgacagcgtgaaaacacggaagcagcttggccccgatcctttcaaaaggccggcggccacgaaaaaggccggccaggcaaaaaagaaaaagggatcctacccatacgatgttccagattacgcttatccctacgacgtgcctgattatgcatacccatatgatgtccccgactatgcctaagaattctgcagatatccagcacagtggcggccgctcgagtctagagggcccgtttaaacccgctgatcagcctcgactgtgccttctagttgccagccatctgttgtttgcccctcccccgtgccttccttgaccctggaaggtgccactcccactgtcctttcctaataaaatgaggaaattgcatcgcattgtctgagtaggtgtcattctattctggggggtggggtggggcaggacagcaagggggaggattgggaagacaatagcaggcatgctggggatgcggtgggctctatggcttctgaggcggaaagaaccagctggggctctagggggtatccccacgcgccctgtagcggcgcattaagcgcggcgggtgtggtggttacgcgcagcgtgaccgctacacttgccagcgccctagcgcccgctcctttcgctttcttcccttcctttctcgccacgttcgccggctttccccgtcaagctctaaatcgggggctccctttagggttccgatttagtgctttacggcacctcgaccccaaaaaacttgattagggtgatggttcacgtagtgggccatcgccctgatagacggtttttcgccctttgacgttggagtccacgttctttaatagtggactcttgttccaaactggaacaacactcaaccctatctcggtctattcttttgatttataagggattttgccgatttcggcctattggttaaaaaatgagctgatttaacaaaaatttaacgcgaattaattctgtggaatgtgtgtcagttagggtgtggaaagtccccaggctccccagcaggcagaagtatgcaaagcatgcatctcaattagtcagcaaccaggtgtggaaagtccccaggctccccagcaggcagaagtatgcaaagcatgcatctcaattagtcagcaaccatagtcccgcccctaactccgcccatcccgcccctaactccgcccagttccgcccattctccgccccatggctgactaattttttttatttatgcagaggccgaggccgcctctgcctctgagctattccagaagtagtgaggaggcttttttggaggcctaggcttttgcaaaaagctcccgggagcttgtatatccattttcggatctgatcaagagacaggatgaggatcgtttcgcatgattgaacaagatggattgcacgcaggttctccggccgcttgggtggagaggctattcggctatgactgggcacaacagacaatcggctgctctgatgccgccgtgttccggctgtcagcgcaggggcgcccggttctttttgtcaagaccgacctgtccggtgccctgaatgaactgcaggacgaggcagcgcggctatcgtggctggccacgacgggcgttccttgcgcagctgtgctcgacgttgtcactgaagcgggaagggactggctgctattgggcgaagtgccggggcaggatctcctgtcatctcaccttgctcctgccgagaaagtatccatcatggctgatgcaatgcggcggctgcatacgcttgatccggctacctgcccattcgaccaccaagcgaaacatcgcatcgagcgagcacgtactcggatggaagccggtcttgtcgatcaggatgatctggacgaagagcatcaggggctcgcgccagccgaactgttcgccaggctcaaggcgcgcatgcccgacggcgaggatctcgtcgtgacccatggcgatgcctgcttgccgaatatcatggtggaaaatggccgcttttctggattcatcgactgtggccggctgggtgtggcggaccgctatcaggacatagcgttggctacccgtgatattgctgaagagcttggcggcgaatgggctgaccgcttcctcgtgctttacggtatcgccgctcccgattcgcagcgcatcgccttctatcgccttcttgacgagttcttctgagcgggactctggggttcgaaatgaccgaccaagcgacgcccaacctgccatcacgagatttcgattccaccgccgccttctatgaaaggttgggcttcggaatcgttttccgggacgccggctggatgatcctccagcgcggggatctcatgctggagttcttcgcccaccccaacttgtttattgcagcttataatggttacaaataaagcaatagcatcacaaatttcacaaataaagcatttttttcactgcattctagttgtggtttgtccaaactcatcaatgtatcttatcatgtctgtataccgtcgacctctagctagagcttggcgtaatcatggtcatagctgtttcctgtgtgaaattgttatccgctcacaattccacacaacatacgagccggaagcataaagtgtaaagcctggggtgcctaatgagtgagctaactcacattaattgcgttgcgctcactgcccgctttccagtcgggaaacctgtcgtgccagctgcattaatgaatcggccaacgcgcggggagaggcggtttgcgtattgggcgctcttccgcttcctcgctcactgactcgctgcgctcggtcgttcggctgcggcgagcggtatcagctcactcaaaggcggtaatacggttatccacagaatcaggggataacgcaggaaagaacatgtgagcaaaaggccagcaaaaggccaggaaccgtaaaaaggccgcgttgctggcgtttttccataggctccgcccccctgacgagcatcacaaaaatcgacgctcaagtcagaggtggcgaaacccgacaggactataaagataccaggcgtttccccctggaagctccctcgtgcgctctcctgttccgaccctgccgcttaccggatacctgtccgcctttctcccttcgggaagcgtggcgctttctcatagctcacgctgtaggtatctcagttcggtgtaggtcgttcgctccaagctgggctgtgtgcacgaaccccccgttcagcccgaccgctgcgccttatccggtaactatcgtcttgagtccaacccggtaagacacgacttatcgccactggcagcagccactggtaacaggattagcagagcgaggtatgtaggcggtgctacagagttcttgaagtggtggcctaactacggctacactagaagaacagtatttggtatctgcgctctgctgaagccagttaccttcggaaaaagagttggtagctcttgatccggcaaacaaaccaccgctggtagcggtttttttgtttgcaagcagcagattacgcgcagaaaaaaaggatctcaagaagatcctttgatcttttctacggggtctgacgctcagtggaacgaaaactcacgttaagggattttggtcatgagattatcaaaaaggatcttcacctagatccttttaaattaaaaatgaagttttaaatcaatctaaagtatatatgagtaaacttggtctgacagttaccaatgcttaatcagtgaggcacctatctcagcgatctgtctatttcgttcatccatagttgcctgactccccgtcgtgtagataactacgatacgggagggcttaccatctggccccagtgctgcaatgataccgcgagacccacgctcaccggctccagatttatcagcaataaaccagccagccggaagggccgagcgcagaagtggtcctgcaactttatccgcctccatccagtctattaattgttgccgggaagctagagtaagtagttcgccagttaatagtttgcgcaacgttgttgccattgctacaggcatcgtggtgtcacgctcgtcgtttggtatggcttcattcagctccggttcccaacgatcaaggcgagttacatgatcccccatgttgtgcaaaaaagcggttagctccttcggtcctccgatcgttgtcagaagtaagttggccgcagtgttatcactcatggttatggcagcactgcataattctcttactgtcatgccatccgtaagatgcttttctgtgactggtgagtactcaaccaagtcattctgagaatagtgtatgcggcgaccgagttgctcttgcccggcgtcaatacgggataataccgcgccacatagcagaactttaaaagtgctcatcattggaaaacgttcttcggggcgaaaactctcaaggatcttaccgctgttgagatccagttcgatgtaacccactcgtgcacccaactgatcttcagcatcttttactttcaccagcgtttctgggtgagcaaaaacaggaaggcaaaatgccgcaaaaaagggaataagggcgacacggaaatgttgaatactcatactcttcctttttcaatattattgaagcatttatcagggttattgtctcatgagcggatacatatttgaatgtatttagaaaaataaacaaataggggttccgcgcacatttccccgaaaagtgccacctgacgtc

SEQ ID NO: 585 - DNA, 7814 bp, Unknown
  Member of the phylum Planctomycetes
gacggatcgggagatctcccgatcccctatggtgcactctcagtacaatctgctctgatgccgcatagttaagccagtatctgctccctgcttgtgtgttggaggtcgctgagtagtgcgcgagcaaaatttaagctacaacaaggcaaggcttgaccgacaattgcatgaagaatctgcttagggttaggcgttttgcgctgcttcgcgatgtacgggccagatatacgcgttgacattgattattgactagttattaatagtaatcaattacggggtcattagttcatagcccatatatggagttccgcgttacataacttacggtaaatggcccgcctggctgaccgcccaacgacccccgcccattgacgtcaataatgacgtatgttcccatagtaacgccaatagggactttccattgacgtcaatgggtggagtatttacggtaaactgcccacttggcagtacatcaagtgtatcatatgccaagtacgccccctattgacgtcaatgacggtaaatggcccgcctggcattatgcccagtacatgaccttatgggactttcctacttggcagtacatctacgtattagtcatcgctattaccatggtgatgcggttttggcagtacatcaatgggcgtggatagcggtttgactcacggggatttccaagtctccaccccattgacgtcaatgggagtttgttttggcaccaaaatcaacgggactttccaaaatgtcgtaacaactccgccccattgacgcaaatgggcggtaggcgtgtacggtgggaggtctatataagcagagctctctggctaactagagaacccactgcttactggcttatcgaaattaatacgactcactatagggagacccaagctggctagcgtttaaacttaagcttgccaccatggccccaaagaagaagcggaaggtcggtatccacggagtcccagcagccagcgtgcggagctttcaggccagagtggaatgcgacaagcagaccatggaacacctgtggcggacccacaaggtgttcaacgagagactgcccgagatcatcaagatcctgttcaagatgaagcggggcgagtgcggccagaacgataagcagaagtccctgtacaagagcatcagccagagcatcctggaagccaacgctcagaacgccgactacctgctgaacagcgtgtccatcaaaggctggaagcctggcaccgccaagaagtacagaaacgccagcttcacctgggccgacgatgccgctaaactgtctagccagggcatccacgtgtacgacaagaaacaggtgctgggcgacctgcctggcatgatgtctcagatggtctgcaggcagagcgtggaagccatctctggacacatcgagctgaccaagaagtgggagaaagaacacaacgagtggctgaaagaaaaagagaaatgggagtccgaggacgagcacaagaagtatctggacctgcgcgagaagttcgagcagtttgagcagagcatcggcggcaagatcaccaagagaagaggccggtggcacctgtacctgaagtggctgagcgacaaccctgattttgccgcctggcggggaaacaaggccgtgatcaatcctctgagcgagaaggcccagatcaggatcaacaaggccaagccgaacaagaagaacagcgtcgagcgggacgagttcttcaaggccaatcctgagatgaaggccctggacaacctgcacggctactacgagcggaatttcgtgcggcggagaaagacaaagaagaaccccgacggcttcgaccacaagcctaccttcacactgccccatcctaccatccatcctcgttggttcgtgttcaacaagcctaagacaaaccccgagggctaccgcaagctgatcctgcctaaaaaggccggcgatctgggcagcctggaaatgagactgctgaccggcgagaagaacaagggcaactaccccgacgactggatcagcgtgaagtttaaggccgatcctcggctgagcctgatcagacccgtgaaaggcagacgggttgtgcggaagggcaaagagcagggccagaccaaagagacagacagctacgagtttttcgacaagcacctgaagaagtggcggcctgccaaactgtctggcgtgaagctgatcttccccgacaagacacctaaggccgcctacctgtacttcacctgtgacatccccgacgagcccctgaccgagacagccaagaaaatccagtggctggaaaccggcgacgtgaccaaaaagggcaagaaacgcaaaaagaaggtgctgccccacggcctggtgtcctgtgctgttgatctgagcatgcggagaggcaccaccggctttgccacactgtgcagatacgagaatggcaagatccacatcctgcggagccggaacctgtgggtcggatacaaagaaggcaagggctgtcacccctacagatggacagagggacccgacctgggacacattgccaagcacaagagagagatcagaatcctgcggtccaagcggggcaagcctgtgaagggcgaagagagccacatcgacctgcagaaacacatcgactacatgggcgaagatcggttcaagaaggccgccagaaccatcgtgaacttcgccctgaacaccgagaacgccgccagcaagaatggcttctaccccagagctgacgtgctgctgctggaaaacctggaaggactgatccccgatgccgagaaagagcggggcatcaatagagccctggccggctggaatagacggcacctggttgagcgcgtgatcgagatggccaaggatgccggcttcaagcggcgggtgttcgagatcccaccttacggcacaagccaagtgtgcagcaaatgtggcgccctgggcagaagatacagcatcatcagagagaacaaccggcgcgagatcagattcggctacgtggaaaagctgttcgcctgtcctaactgcggctactgcgccaacgccgatcacaatgccagcgtgaacctgaaccggcggttcctgatcgaggacagcttcaagtcctactacgactggaagcggctgtccgagaagaagcagaaagaggaaatcgagacaatcgagtccaagctgatggataagctgtgcgccatgcacaagatcagccggggcagcatcagcaagaaaaggccggcggccacgaaaaaggccggccaggcaaaaaagaaaaagggatcctacccatacgatgttccagattacgcttatccctacgacgtgcctgattatgcatacccatatgatgtccccgactatgcctaagaattctgcagatatccagcacagtggcggccgctcgagtctagagggcccgtttaaacccgctgatcagcctcgactgtgccttctagttgccagccatctgttgtttgcccctcccccgtgccttccttgaccctggaaggtgccactcccactgtcctttcctaataaaatgaggaaattgcatcgcattgtctgagtaggtgtcattctattctggggggtggggtggggcaggacagcaagggggaggattgggaagacaatagcaggcatgctggggatgcggtgggctctatggcttctgaggcggaaagaaccagctggggctctagggggtatccccacgcgccctgtagcggcgcattaagcgcggcgggtgtggtggttacgcgcagcgtgaccgctacacttgccagcgccctagcgcccgctcctttcgctttcttcccttcctttctcgccacgttcgccggctttccccgtcaagctctaaatcgggggctccctttagggttccgatttagtgctttacggcacctcgaccccaaaaaacttgattagggtgatggttcacgtagtgggccatcgccctgatagacggtttttcgccctttgacgttggagtccacgttctttaatagtggactcttgttccaaactggaacaacactcaaccctatctcggtctattcttttgatttataagggattttgccgatttcggcctattggttaaaaaatgagctgatttaacaaaaatttaacgcgaattaattctgtggaatgtgtgtcagttagggtgtggaaagtccccaggctccccagcaggcagaagtatgcaaagcatgcatctcaattagtcagcaaccaggtgtggaaagtccccaggctccccagcaggcagaagtatgcaaagcatgcatctcaattagtcagcaaccatagtcccgcccctaactccgcccatcccgcccctaactccgcccagttccgcccattctccgccccatggctgactaattttttttatttatgcagaggccgaggccgcctctgcctctgagctattccagaagtagtgaggaggcttttttggaggcctaggcttttgcaaaaagctcccgggagcttgtatatccattttcggatctgatcaagagacaggatgaggatcgtttcgcatgattgaacaagatggattgcacgcaggttctccggccgcttgggtggagaggctattcggctatgactgggcacaacagacaatcggctgctctgatgccgccgtgttccggctgtcagcgcaggggcgcccggttctttttgtcaagaccgacctgtccggtgccctgaatgaactgcaggacgaggcagcgcggctatcgtggctggccacgacgggcgttccttgcgcagctgtgctcgacgttgtcactgaagcgggaagggactggctgctattgggcgaagtgccggggcaggatctcctgtcatctcaccttgctcctgccgagaaagtatccatcatggctgatgcaatgcggcggctgcatacgcttgatccggctacctgcccattcgaccaccaagcgaaacatcgcatcgagcgagcacgtactcggatggaagccggtcttgtcgatcaggatgatctggacgaagagcatcaggggctcgcgccagccgaactgttcgccaggctcaaggcgcgcatgcccgacggcgaggatctcgtcgtgacccatggcgatgcctgcttgccgaatatcatggtggaaaatggccgcttttctggattcatcgactgtggccggctgggtgtggcggaccgctatcaggacatagcgttggctacccgtgatattgctgaagagcttggcggcgaatgggctgaccgcttcctcgtgctttacggtatcgccgctcccgattcgcagcgcatcgccttctatcgccttcttgacgagttcttctgagcgggactctggggttcgaaatgaccgaccaagcgacgcccaacctgccatcacgagatttcgattccaccgccgccttctatgaaaggttgggcttcggaatcgttttccgggacgccggctggatgatcctccagcgcggggatctcatgctggagttcttcgcccaccccaacttgtttattgcagcttataatggttacaaataaagcaatagcatcacaaatttcacaaataaagcatttttttcactgcattctagttgtggtttgtccaaactcatcaatgtatcttatcatgtctgtataccgtcgacctctagctagagcttggcgtaatcatggtcatagctgtttcctgtgtgaaattgttatccgctcacaattccacacaacatacgagccggaagcataaagtgtaaagcctggggtgcctaatgagtgagctaactcacattaattgcgttgcgctcactgcccgctttccagtcgggaaacctgtcgtgccagctgcattaatgaatcggccaacgcgcggggagaggcggtttgcgtattgggcgctcttccgcttcctcgctcactgactcgctgcgctcggtcgttcggctgcggcgagcggtatcagctcactcaaaggcggtaatacggttatccacagaatcaggggataacgcaggaaagaacatgtgagcaaaaggccagcaaaaggccaggaaccgtaaaaaggccgcgttgctggcgtttttccataggctccgcccccctgacgagcatcacaaaaatcgacgctcaagtcagaggtggcgaaacccgacaggactataaagataccaggcgtttccccctggaagctccctcgtgcgctctcctgttccgaccctgccgcttaccggatacctgtccgcctttctcccttcgggaagcgtggcgctttctcatagctcacgctgtaggtatctcagttcggtgtaggtcgttcgctccaagctgggctgtgtgcacgaaccccccgttcagcccgaccgctgcgccttatccggtaactatcgtcttgagtccaacccggtaagacacgacttatcgccactggcagcagccactggtaacaggattagcagagcgaggtatgtaggcggtgctacagagttcttgaagtggtggcctaactacggctacactagaagaacagtatttggtatctgcgctctgctgaagccagttaccttcggaaaaagagttggtagctcttgatccggcaaacaaaccaccgctggtagcggtttttttgtttgcaagcagcagattacgcgcagaaaaaaaggatctcaagaagatcctttgatcttttctacggggtctgacgctcagtggaacgaaaactcacgttaagggattttggtcatgagattatcaaaaaggatcttcacctagatccttttaaattaaaaatgaagttttaaatcaatctaaagtatatatgagtaaacttggtctgacagttaccaatgcttaatcagtgaggcacctatctcagcgatctgtctatttcgttcatccatagttgcctgactccccgtcgtgtagataactacgatacgggagggcttaccatctggccccagtgctgcaatgataccgcgagacccacgctcaccggctccagatttatcagcaataaaccagccagccggaagggccgagcgcagaagtggtcctgcaactttatccgcctccatccagtctattaattgttgccgggaagctagagtaagtagttcgccagttaatagtttgcgcaacgttgttgccattgctacaggcatcgtggtgtcacgctcgtcgtttggtatggcttcattcagctccggttcccaacgatcaaggcgagttacatgatcccccatgttgtgcaaaaaagcggttagctccttcggtcctccgatcgttgtcagaagtaagttggccgcagtgttatcactcatggttatggcagcactgcataattctcttactgtcatgccatccgtaagatgcttttctgtgactggtgagtactcaaccaagtcattctgagaatagtgtatgcggcgaccgagttgctcttgcccggcgtcaatacgggataataccgcgccacatagcagaactttaaaagtgctcatcattggaaaacgttcttcggggcgaaaactctcaaggatcttaccgctgttgagatccagttcgatgtaacccactcgtgcacccaactgatcttcagcatcttttactttcaccagcgtttctgggtgagcaaaaacaggaaggcaaaatgccgcaaaaaagggaataagggcgacacggaaatgttgaatactcatactcttcctttttcaatattattgaagcatttatcagggttattgtctcatgagcggatacatatttgaatgtatttagaaaaataaacaaataggggttccgcgcacatttccccgaaaagtgccacctgacgtc

SEQ ID NO: 586 - DNA, 8936 bp, Artificial Sequence
  Synthetic Oligonucleotide
agaacatgtgagcaaaaggccagcaaaaggccaggaaccgtaaaaaggccgcgttgctggcgtttttccataggctccgcccccctgacgagcatcacaaaaatcgacgctcaagtcagaggtggcgaaacccgacaggactataaagataccaggcgtttccccctggaagctccctcgtgcgctctcctgttccgaccctgccgcttaccggatacctgtccgcctttctcccttcgggaagcgtggcgctttctcatagctcacgctgtaggtatctcagttcggtgtaggtcgttcgctccaagctgggctgtgtgcacgaaccccccgttcagcccgaccgctgcgccttatccggtaactatcgtcttgagtccaacccggtaagacacgacttatcgccactggcagcagccactggtaacaggattagcagagcgaggtatgtaggcggtgctacagagttcttgaagtggtggcctaactacggctacactagaagaacagtatttggtatctgcgctctgctgaagccagttaccttcggaaaaagagttggtagctcttgatccggcaaacaaaccaccgctggtagcggtggtttttttgtttgcaagcagcagattacgcgcagaaaaaaaggatctcaagaagatcctttgatcttttctacggggtctgacgctcagtggaacgaaaactcacgttaagggattttggtcatgagattatcaaaaaggatcttcacctagatccttttaaattaaaaatgaagttttaaatcaatctaaagtatatatgagtaaacttggtctgacagttaccaatgcttaatcagtgaggcacctatctcagcgatctgtctatttcgttcatccatagttgcctgactccccgtcgtgtagataactacgatacgggagggcttaccatctggccccagtgctgcaatgataccgcgagacccacgctcaccggctccagatttatcagcaataaaccagccagccggaagggccgagcgcagaagtggtcctgcaactttatccgcctccatccagtctattaattgttgccgggaagctagagtaagtagttcgccagttaatagtttgcgcaacgttgttgccattgctacaggcatcgtggtgtcacgctcgtcgtttggtatggcttcattcagctccggttcccaacgatcaaggcgagttacatgatcccccatgttgtgcaaaaaagcggttagctccttcggtcctccgatcgttgtcagaagtaagttggccgcagtgttatcactcatggttatggcagcactgcataattctcttactgtcatgccatccgtaagatgcttttctgtgactggtgagtactcaaccaagtcattctgagaatagtgtatgcggcgaccgagttgctcttgcccggcgtcaatacgggataataccgcgccacatagcagaactttaaaagtgctcatcattggaaaacgttcttcggggcgaaaactctcaaggatcttaccgctgttgagatccagttcgatgtaacccactcgtgcacccaactgatcttcagcatcttttactttcaccagcgtttctgggtgagcaaaaacaggaaggcaaaatgccgcaaaaaagggaataagggcgacacggaaatgttgaatactcatactcttcctttttcaatattattgaagcatttatcagggttattgtctcatgagcggatacatatttgaatgtatttagaaaaataaacaaataggggttccgcgcacatttccccgaaaagtgccacctgacgtcgacggatcgggagatctcccgatcccctatggtgcactctcagtacaatctgctctgatgccgcatagttaagccagtatctgctccctgcttgtgtgttggaggtcgctgagtagtgcgcgagcaaaatttaagctacaacaaggcaaggcttgaccgacaattgcatgaagaatctgcttagggttaggcgttttgcgctgcttcgcgatgtacgggccagatatacgcgttgacattgattattgactagttattaatagtaatcaattacggggtcattagttcatagcccatatatggagttccgcgttacataacttacggtaaatggcccgcctggctgaccgcccaacgacccccgcccattgacgtcaataatgacgtatgttcccatagtaacgccaatagggactttccattgacgtcaatgggtggagtatttacggtaaactgcccacttggcagtacatcaagtgtatcatatgccaagtacgccccctattgacgtcaatgacggtaaatggcccgcctggcattatgcccagtacatgaccttatgggactttcctacttggcagtacatctacgtattagtcatcgctattaccatggtgatgcggttttggcagtacatcaatgggcgtggatagcggtttgactcacggggatttccaagtctccaccccattgacgtcaatgggagtttgttttggcaccaaaatcaacgggactttccaaaatgtcgtaacaactccgccccattgacgcaaatgggcggtaggcgtgtacggtgggaggtctatataagcagagctctctggctaactagagaacccactgcttactggcttatcgaaattaatacgactcactatagggagacccaagctggctagcgtttaaacttaagcttgccaccatggccccaaagaagaagcggaaggtcggtatccacggagtcccagcagccggatccgccatccggtccatcaagctgaagatgaagaccaacagcggcaccgacagcatctacctgagaaaagccctgtggcggacccaccagctgatcaatgagggaatcgcctactacatgaacctgctgaccctgtaccggcaagaggccatcggcgacaagaccaaagaagcctatcaggccgagctgattaacatcatccggaaccagcagcggaacaacggcagctctgaggaacacggctccgaccaagaaattctggccctgctgagacagctgtacgagctgatcatccccagcagcatcggcgaatctggcgacgctaatcagctgggcaacaagtttctgtaccctctggtggaccccaacagccagtctggcaagggcacatctaacgccggcagaaagcccagatggaagcggctgaaagaggaaggcaaccccgactgggaactcgagaagaagaaggacgaggaacgcaaggccaaggatcccaccgtgaagatctttgacaacctgaacaaatacggcctgctgcctctgttcccactgttcaccaacatccagaaagacatcgagtggctgcccctgggcaagagacagtctgtgcggaagtgggacaaagacatgttcatccaggccatcgagagactgctgagctgggagagctggaacagaagagtggccgacgagtacaaacagctgaaagaaaagaccgagagctactacaaagagcacctgacaggcggcgaggaatggatcgagaagatccggaagttcgagaaagaacggaacatggaactggaaaagaacgccttcgctcccaacgacggctacttcatcaccagcagacagatcagaggctgggacagagtgtacgagaagtggtccaagctgcccgagtctgctagccctgaggaactgtggaaagtggtggccgagcagcagaacaagatgtccgaaggcttcggcgaccccaaggtgttcagcttcctggccaacagagagaaccgggacatttggagaggccacagcgagcggatctaccacattgccgcctacaacggcctgcagaagaagctgagccggaccaaagagcaggccaccttcacactgcctgacgccattgaacaccctctgtggatcagatacgagagccctggcggcaccaacctgaatctgttcaagctggaagagaaacagaaaaagaactactacgtgaccctgagcaagatcatctggcccagcgaggaaaagtggattgagaaagagaacatcgagatccctctggctcccagcatccagttcaaccggcagattaagctgaagcagcacgtgaagggcaagcaagagatcagcttcagcgactacagcagccggatcagcctggatggtgttctcggcggcagcagaatccagtttaatcggaagtacatcaagaaccacaaagagctgctcggagagggcgacatcggccccgtgttctttaacctggtggtggatgtggcccctctgcaagaaaccagaaacggcagactgcagagccccatcggcaaggccctgaaagtgatcagcagcgacttctccaaagtgatcgactacaagccgaaagaactcatggattggatgaataccggcagcgccagcaacagctttggagtggcttctctgctggaaggcatgagagtgatgagcatcgacatgggccagagaaccagcgcctccgtgtccatcttcgaggtcgtgaaagaactgcccaaggatcaagagcagaagctgttctacagcatcaacgacaccgagctgttcgccatccacaagcggagctttctgctgaacctgcctggcgaggtggtcaccaagaacaacaagcagcagcggcaagagcggcggaaaaagcggcagtttgtgcggagccagatcagaatgctggccaacgtgctgcggctggaaacaaagaaaacccctgacgagcggaagaaggccattcacaagctgatggaaatcgtgcagagctacgacagctggaccgccagccagaaagaagtgtgggagaaagagctgaatctcctgaccaacatggccgccttcaatgacgagatctggaaagaaagcctggtggaactgcaccaccggatcgagccttacgtgggacagatcgtgtccaagtggcggaagggcctgtctgagggcagaaagaatctggccggcatcagcatgtggaacatcgacgaactggaagataccaggcggctgctgatttcctggtccaagagaagcagaaccccaggcgaggccaacaggatcgaaaccgatgagcctttcggcagcagcctgctccagcacattcagaacgtgaaggacgacagactgaagcagatggccaacctgatcatcatgacagccctgggctttaagtacgacaaagaggaaaaggaccggtacaagcggtggaaagagacataccccgcctgccagatcatcctgttcgagaacctgaaccgctacctgttcaacctcgaccggtccagacgcgagaacagcagactgatgaagtgggcccatcggagcatccccagaaccgtgtctatgcagggcgagatgttcggcctgcaagtgggcgacgttcggagcgagtacagctccagattccacgccaaaacaggcgcccctggcatcagatgtcacgccctgactgaagaggatctgaaggccggcagcaacaccctgaagagactgatcgaggacggcttcatcaatgagagcgagctggcctacctgaagaagggcgatatcatccctagccaaggcggcgaactgttcgtgacactgtccaagcggtacaagaaggacagcgacaacaacgagctgaccgtgatccacgccgacatcaacgccgctcagaatctgcagaagcggttttggcagcaaaacagcgaggtgtacagagtgccctgtcagctggccagaatgggcgaagataagctgtacatccccaagagccagaccgagacaatcaagaagtatttcggcaagggctccttcgtgaagaacaataccgaacaagaggtctacaagtgggagaagtccgagaaaatgaagatcaagacggacaccaccttcgacctgcaagacctggatggcttcgaggacatcagcaagaccattgagctggcacaagagcagcaaaagaaatacctgaccatgttcagggaccccagcggctactttttcaacaatgagacatggcggcctcaaaaagaatactggtccatcgtgaacaacatcatcaagagctgcctcaagaagaagatcctgagcaacaaggtcgagctgggatccaaaaggccggcggccacgaaaaaggccggccaggcaaaaaagaaaaagggatcttacccatacgatgttccagattacgcttatccctacgacgtgcctgattatgcatacccatatgatgtccccgactatgcctaagaattctgcagatatccagcacagtggcggccgctcgagtctagagggcccgtttaaacccgctgatcagcctcgactgtgccttctagttgccagccatctgttgtttgcccctcccccgtgccttccttgaccctggaaggtgccactcccactgtcctttcctaataaaatgaggaaattgcatcgcattgtctgagtaggtgtcattctattctggggggtggggtggggcaggacagcaagggggaggattgggaagacaatagcaggcatgctggggatgcggtgggctctatggcttctgaggcggaaagaaccagctggggctctagggggtatccccacgcgccctgtagcggcgcattaagcgcggcgggtgtggtggttacgcgcagcgtgaccgctacacttgccagcgccctagcgcccgctcctttcgctttcttcccttcctttctcgccacgttcgccggctttccccgtcaagctctaaatcgggggctccctttagggttccgatttagtgctttacggcacctcgaccccaaaaaacttgattagggtgatggttcacgtagtgggccatcgccctgatagacggtttttcgccctttgacgttggagtccacgttctttaatagtggactcttgttccaaactggaacaacactcaaccctatctcggtctattcttttgatttataagggattttgccgatttcggcctattggttaaaaaatgagctgatttaacaaaaatttaacgcgaattaattctgtggaatgtgtgtcagttagggtgtggaaagtccccaggctccccagcaggcagaagtatgcaaagcatgcatctcaattagtcagcaaccaggtgtggaaagtccccaggctccccagcaggcagaagtatgcaaagcatgcatctcaattagtcagcaaccatagtcccgcccctaactccgcccatcccgcccctaactccgcccagttccgcccattctccgccccatggctgactaattttttttatttatgcagaggccgaggccgcctctgcctctgagctattccagaagtagtgaggaggcttttttggaggcctaggcttttgcaaaaagctcccgggagcttgtatatccattttcggatctgatcaagagacaggatgaggatcgtttcgcatgattgaacaagatggattgcacgcaggttctccggccgcttgggtggagaggctattcggctatgactgggcacaacagacaatcggctgctctgatgccgccgtgttccggctgtcagcgcaggggcgcccggttctttttgtcaagaccgacctgtccggtgccctgaatgaactgcaggacgaggcagcgcggctatcgtggctggccacgacgggcgttccttgcgcagctgtgctcgacgttgtcactgaagcgggaagggactggctgctattgggcgaagtgccggggcaggatctcctgtcatctcaccttgctcctgccgagaaagtatccatcatggctgatgcaatgcggcggctgcatacgcttgatccggctacctgcccattcgaccaccaagcgaaacatcgcatcgagcgagcacgtactcggatggaagccggtcttgtcgatcaggatgatctggacgaagagcatcaggggctcgcgccagccgaactgttcgccaggctcaaggcgcgcatgcccgacggcgaggatctcgtcgtgacccatggcgatgcctgcttgccgaatatcatggtggaaaatggccgcttttctggattcatcgactgtggccggctgggtgtggcggaccgctatcaggacatagcgttggctacccgtgatattgctgaagagcttggcggcgaatgggctgaccgcttcctcgtgctttacggtatcgccgctcccgattcgcagcgcatcgccttctatcgccttcttgacgagttcttctgagcgggactctggggttcgaaatgaccgaccaagcgacgcccaacctgccatcacgagatttcgattccaccgccgccttctatgaaaggttgggcttcggaatcgttttccgggacgccggctggatgatcctccagcgcggggatctcatgctggagttcttcgcccaccccaacttgtttattgcagcttataatggttacaaataaagcaatagcatcacaaatttcacaaataaagcatttttttcactgcattctagttgtggtttgtccaaactcatcaatgtatcttatcatgtctgtataccgtcgacctctagctagagcttggcgtaatcatggtcatagctgtttcctgtgtgaaattgttatccgctcacaattccacacaacatacgagccggaagcataaagtgtaaagcctggggtgcctaatgagtgagctaactcacattaattgcgttgcgctcactgcccgctttccagtcgggaaacctgtcgtgccagctgcattaatgaatcggccaacgcgcggggagaggcggtttgcgtattgggcgctcttccgcttcctcgctcactgactcgctgcgctcggtcgttcggctgcggcgagcggtatcagctcactcaaaggcggtaatacggttatccacagaatcaggggataacgcaggaa

SEQ ID NO: 587 - DNA, 6516 bp, Artificial Sequence
  Synthetic Oligonucleotide
accttgctcctgccgagaaagtatccatcatggctgatgcaatgcggcggctgcatacgcttgatccggctacctgcccattcgaccaccaagcgaaacatcgcatcgagcgagcacgtactcggatggaagccggtcttgtcgatcaggatgatctggacgaagagcatcaggggctcgcgccagccgaactgttcgccaggctcaaggcgcgcatgcccgacggcgaggatctcgtcgtgacccatggcgatgcctgcttgccgaatatcatggtggaaaatggccgcttttctggattcatcgactgtggccggctgggtgtggcggaccgctatcaggacatagcgttggctacccgtgatattgctgaagagcttggcggcgaatgggctgaccgcttcctcgtgctttacggtatcgccgctcccgattcgcagcgcatcgccttctatcgccttcttgacgagttcttctgagcgggactctggggttcgaaatgaccgaccaagcgacgcccaacctgccatcacgagatttcgattccaccgccgccttctatgaaaggttgggcttcggaatcgttttccgggacgccggctggatgatcctccagcgcggggatctcatgctggagttcttcgcccaccccaacttgtttattgcagcttataatggttacaaataaagcaatagcatcacaaatttcacaaataaagcatttttttcactgcattctagttgtggtttgtccaaactcatcaatgtatcttatcatgtctgtataccgtcgacctctagctagagcttggcgtaatcatggtcatagctgtttcctgtgtgaaattgttatccgctcacaattccacacaacatacgagccggaagcataaagtgtaaagcctggggtgcctaatgagtgagctaactcacattaattgcgttgcgctcactgcccgctttccagtcgggaaacctgtcgtgccagctgcattaatgaatcggccaacgcgcggggagaggcggtttgcgtattgggcgctcttccgcttcctcgctcactgactcgctgcgctcggtcgttcggctgcggcgagcggtatcagctcactcaaaggcggtaatacggttatccacagaatcaggggataacgcaggaaagaacatgtgagcaaaaggccagcaaaaggccaggaaccgtaaaaaggccgcgttgctggcgtttttccataggctccgcccccctgacgagcatcacaaaaatcgacgctcaagtcagaggtggcgaaacccgacaggactataaagataccaggcgtttccccctggaagctccctcgtgcgctctcctgttccgaccctgccgcttaccggatacctgtccgcctttctcccttcgggaagcgtggcgctttctcatagctcacgctgtaggtatctcagttcggtgtaggtcgttcgctccaagctgggctgtgtgcacgaaccccccgttcagcccgaccgctgcgccttatccggtaactatcgtcttgagtccaacccggtaagacacgacttatcgccactggcagcagccactggtaacaggattagcagagcgaggtatgtaggcggtgctacagagttcttgaagtggtggcctaactacggctacactagaagaacagtatttggtatctgcgctctgctgaagccagttaccttcggaaaaagagttggtagctcttgatccggcaaacaaaccaccgctggtagcggtttttttgtttgcaagcagcagattacgcgcagaaaaaaaggatctcaagaagatcctttgatcttttctacggggtctgacgctcagtggaacgaaaactcacgttaagggattttggtcatgagattatcaaaaaggatcttcacctagatccttttaaattaaaaatgaagttttaaatcaatctaaagtatatatgagtaaacttggtctgacagttaccaatgcttaatcagtgaggcacctatctcagcgatctgtctatttcgttcatccatagttgcctgactccccgtcgtgtagataactacgatacgggagggcttaccatctggccccagtgctgcaatgataccgcgagacccacgctcaccggctccagatttatcagcaataaaccagccagccggaagggccgagcgcagaagtggtcctgcaactttatccgcctccatccagtctattaattgttgccgggaagctagagtaagtagttcgccagttaatagtttgcgcaacgttgttgccattgctacaggcatcgtggtgtcacgctcgtcgtttggtatggcttcattcagctccggttcccaacgatcaaggcgagttacatgatcccccatgttgtgcaaaaaagcggttagctccttcggtcctccgatcgttgtcagaagtaagttggccgcagtgttatcactcatggttatggcagcactgcataattctcttactgtcatgccatccgtaagatgcttttctgtgactggtgagtactcaaccaagtcattctgagaatagtgtatgcggcgaccgagttgctcttgcccggcgtcaatacgggataataccgcgccacatagcagaactttaaaagtgctcatcattggaaaacgttcttcggggcgaaaactctcaaggatcttaccgctgttgagatccagttcgatgtaacccactcgtgcacccaactgatcttcagcatcttttactttcaccagcgtttctgggtgagcaaaaacaggaaggcaaaatgccgcaaaaaagggaataagggcgacacggaaatgttgaatactcatactcttcctttttcaatattattgaagcatttatcagggttattgtctcatgagcggatacatatttgaatgtatttagaaaaataaacaaataggggttccgcgcacatttccccgaaaagtgccacctgacgtcgacggatcgggagatctcccgatcccctatggtgcactctcagtacaatctgctctgatgccgcatagttaagccagtatctgctccctgcttgtgtgttggaggtcgctgagtagtgcgcgagcaaaatttaagctacaacaaggcaaggcttgaccgacttaattaagagggcctatttcccatgattccttcatatttgcatatacgatacaaggctgttagagagataattggaattaatttgactgtaaacacaaagatattagtacaaaatacgtgacgtagaaagtaataatttcttgggtagtttgcagttttaaaattatgttttaaaatggactatcatatgcttaccgtaacttgaaagtatttcgatttcttggctttatatatcttgtggaaaggacgaaacaccggacctatagggtcaatgaatctgtgcgtgtgccataagtaattaaaaattacccaccacaggagcacctgaaaacaggtgcttggcacggagacgatatatcgtctctttttttcaattgcatgaagaatctgcttagggttaggcgttttgcgctgcttcgcgatgtacgggccagatatacgcgttgacattgattattgactagttattaatagtaatcaattacggggtcattagttcatagcccatatatggagttccgcgttacataacttacggtaaatggcccgcctggctgaccgcccaacgacccccgcccattgacgtcaataatgacgtatgttcccatagtaacgccaatagggactttccattgacgtcaatgggtggagtatttacggtaaactgcccacttggcagtacatcaagtgtatcatatgccaagtacgccccctattgacgtcaatgacggtaaatggcccgcctggcattatgcccagtacatgaccttatgggactttcctacttggcagtacatctacgtattagtcatcgctattaccatggtgatgcggttttggcagtacatcaatgggcgtggatagcggtttgactcacggggatttccaagtctccaccccattgacgtcaatgggagtttgttttggcaccaaaatcaacgggactttccaaaatgtcgtaacaactccgccccattgacgcaaatgggcggtaggcgtgtacggtgggaggtctatataagcagagctctctggctaactagagaacccactgcttactggcttatcgaaattaatacgactcactatagggagacccaagctggctagcgtttaaacttaagcttgccggtgccaccatggtgagcaagggcgaggaggataacatggccatcatcaaggagttcatgcgcttcaaggtgcacatggagggctccgtgaacggccacgagttcgagatcgagggcgagggcgagggccgcccctacgagggcacccagaccgccaagctgaaggtgaccaagggtggccccctgcccttcgcctgggacatcctgtcccctcagttcatgtacggctccaaggcctacgtgaagcaccccgccgacatccccgactacttgaagctgtccttccccgagggcttcaagtgggagcgcgtgatgaacttcgaggacggcggcgtggtgaccgtgacccaggactcctccctgcaggacggcgagttcatctacaaggtgaagctgcgcggcaccaacttcccctccgacggccccgtaatgcagaagaagaccatgggctgggaggcctcctccgagcggatgtaccccgaggacggcgccctgaagggcgagatcaagcagaggctgaagctgaaggacggcggccactacgacgctgaggtcaagaccacctacaaggccaagaagcccgtgcagctgcccggcgcctacaacgtcaacatcaagttggacatcacctcccacaacgaggactacaccatcgtggaacagtacgaacgcgccgagggccgccactccaccggcggcatggacgagctgtacaagtacccatacgatgttccagattacgcttaagaattctgcagatatccagcacagtggcggccgctcgagtctagagggcccgtttaaacccgctgatcagcctcgactgtgccttctagttgccagccatctgttgtttgcccctcccccgtgccttccttgaccctggaaggtgccactcccactgtcctttcctaataaaatgaggaaattgcatcgcattgtctgagtaggtgtcattctattctggggggtggggtggggcaggacagcaagggggaggattgggaagacaatagcaggcatgctggggatgcggtgggctctatggcttctgaggcggaaagaaccagctggggctctagggggtatccccacgcgccctgtagcggcgcattaagcgcggcgggtgtggtggttacgcgcagcgtgaccgctacacttgccagcgccctagcgcccgctcctttcgctttcttcccttcctttctcgccacgttcgccggctttccccgtcaagctctaaatcgggggctccctttagggttccgatttagtgctttacggcacctcgaccccaaaaaacttgattagggtgatggttcacgtagtgggccatcgccctgatagacggtttttcgccctttgacgttggagtccacgttctttaatagtggactcttgttccaaactggaacaacactcaaccctatctcggtctattcttttgatttataagggattttgccgatttcggcctattggttaaaaaatgagctgatttaacaaaaatttaacgcgaattaattctgtggaatgtgtgtcagttagggtgtggaaagtccccaggctccccagcaggcagaagtatgcaaagcatgcatctcaattagtcagcaaccaggtgtggaaagtccccaggctccccagcaggcagaagtatgcaaagcatgcatctcaattagtcagcaaccatagtcccgcccctaactccgcccatcccgcccctaactccgcccagttccgcccattctccgccccatggctgactaattttttttatttatgcagaggccgaggccgcctctgcctctgagctattccagaagtagtgaggaggcttttttggaggcctaggcttttgcaaaaagctcccgggagcttgtatatccattttcggatctgatcaagagacaggatgaggatcgtttcgcatgattgaacaagatggattgcacgcaggttctccggccgcttgggtggagaggctattcggctatgactgggcacaacagacaatcggctgctctgatgccgccgtgttccggctgtcagcgcaggggcgcccggttctttttgtcaagaccgacctgtccggtgccctgaatgaactgcaggacgaggcagcgcggctatcgtggctggccacgacgggcgttccttgcgcagctgtgctcgacgttgtcactgaagcgggaagggactggctgctattgggcgaagtgccggggcaggatctcctgtcatctc

SEQ ID NO: 588 - DNA, 6525 bp, Artificial Sequence
  Synthetic Oligonucleotide
accttgctcctgccgagaaagtatccatcatggctgatgcaatgcggcggctgcatacgcttgatccggctacctgcccattcgaccaccaagcgaaacatcgcatcgagcgagcacgtactcggatggaagccggtcttgtcgatcaggatgatctggacgaagagcatcaggggctcgcgccagccgaactgttcgccaggctcaaggcgcgcatgcccgacggcgaggatctcgtcgtgacccatggcgatgcctgcttgccgaatatcatggtggaaaatggccgcttttctggattcatcgactgtggccggctgggtgtggcggaccgctatcaggacatagcgttggctacccgtgatattgctgaagagcttggcggcgaatgggctgaccgcttcctcgtgctttacggtatcgccgctcccgattcgcagcgcatcgccttctatcgccttcttgacgagttcttctgagcgggactctggggttcgaaatgaccgaccaagcgacgcccaacctgccatcacgagatttcgattccaccgccgccttctatgaaaggttgggcttcggaatcgttttccgggacgccggctggatgatcctccagcgcggggatctcatgctggagttcttcgcccaccccaacttgtttattgcagcttataatggttacaaataaagcaatagcatcacaaatttcacaaataaagcatttttttcactgcattctagttgtggtttgtccaaactcatcaatgtatcttatcatgtctgtataccgtcgacctctagctagagcttggcgtaatcatggtcatagctgtttcctgtgtgaaattgttatccgctcacaattccacacaacatacgagccggaagcataaagtgtaaagcctggggtgcctaatgagtgagctaactcacattaattgcgttgcgctcactgcccgctttccagtcgggaaacctgtcgtgccagctgcattaatgaatcggccaacgcgcggggagaggcggtttgcgtattgggcgctcttccgcttcctcgctcactgactcgctgcgctcggtcgttcggctgcggcgagcggtatcagctcactcaaaggcggtaatacggttatccacagaatcaggggataacgcaggaaagaacatgtgagcaaaaggccagcaaaaggccaggaaccgtaaaaaggccgcgttgctggcgtttttccataggctccgcccccctgacgagcatcacaaaaatcgacgctcaagtcagaggtggcgaaacccgacaggactataaagataccaggcgtttccccctggaagctccctcgtgcgctctcctgttccgaccctgccgcttaccggatacctgtccgcctttctcccttcgggaagcgtggcgctttctcatagctcacgctgtaggtatctcagttcggtgtaggtcgttcgctccaagctgggctgtgtgcacgaaccccccgttcagcccgaccgctgcgccttatccggtaactatcgtcttgagtccaacccggtaagacacgacttatcgccactggcagcagccactggtaacaggattagcagagcgaggtatgtaggcggtgctacagagttcttgaagtggtggcctaactacggctacactagaagaacagtatttggtatctgcgctctgctgaagccagttaccttcggaaaaagagttggtagctcttgatccggcaaacaaaccaccgctggtagcggtttttttgtttgcaagcagcagattacgcgcagaaaaaaaggatctcaagaagatcctttgatcttttctacggggtctgacgctcagtggaacgaaaactcacgttaagggattttggtcatgagattatcaaaaaggatcttcacctagatccttttaaattaaaaatgaagttttaaatcaatctaaagtatatatgagtaaacttggtctgacagttaccaatgcttaatcagtgaggcacctatctcagcgatctgtctatttcgttcatccatagttgcctgactccccgtcgtgtagataactacgatacgggagggcttaccatctggccccagtgctgcaatgataccgcgagacccacgctcaccggctccagatttatcagcaataaaccagccagccggaagggccgagcgcagaagtggtcctgcaactttatccgcctccatccagtctattaattgttgccgggaagctagagtaagtagttcgccagttaatagtttgcgcaacgttgttgccattgctacaggcatcgtggtgtcacgctcgtcgtttggtatggcttcattcagctccggttcccaacgatcaaggcgagttacatgatcccccatgttgtgcaaaaaagcggttagctccttcggtcctccgatcgttgtcagaagtaagttggccgcagtgttatcactcatggttatggcagcactgcataattctcttactgtcatgccatccgtaagatgcttttctgtgactggtgagtactcaaccaagtcattctgagaatagtgtatgcggcgaccgagttgctcttgcccggcgtcaatacgggataataccgcgccacatagcagaactttaaaagtgctcatcattggaaaacgttcttcggggcgaaaactctcaaggatcttaccgctgttgagatccagttcgatgtaacccactcgtgcacccaactgatcttcagcatcttttactttcaccagcgtttctgggtgagcaaaaacaggaaggcaaaatgccgcaaaaaagggaataagggcgacacggaaatgttgaatactcatactcttcctttttcaatattattgaagcatttatcagggttattgtctcatgagcggatacatatttgaatgtatttagaaaaataaacaaataggggttccgcgcacatttccccgaaaagtgccacctgacgtcgacggatcgggagatctcccgatcccctatggtgcactctcagtacaatctgctctgatgccgcatagttaagccagtatctgctccctgcttgtgtgttggaggtcgctgagtagtgcgcgagcaaaatttaagctacaacaaggcaaggcttgaccgacttaattaagagggcctatttcccatgattccttcatatttgcatatacgatacaaggctgttagagagataattggaattaatttgactgtaaacacaaagatattagtacaaaatacgtgacgtagaaagtaataatttcttgggtagtttgcagttttaaaattatgttttaaaatggactatcatatgcttaccgtaacttgaaagtatttcgatttcttggctttatatatcttgtggaaaggacgaaacaccggttctgtcttttggtcaggacaaccgtctagctataagtgctgcagggtgtgagaaactcctattgctggacgatgtctcttacgaggcattagcacggagacgatatatcgtctctttttttcaattgcatgaagaatctgcttagggttaggcgttttgcgctgcttcgcgatgtacgggccagatatacgcgttgacattgattattgactagttattaatagtaatcaattacggggtcattagttcatagcccatatatggagttccgcgttacataacttacggtaaatggcccgcctggctgaccgcccaacgacccccgcccattgacgtcaataatgacgtatgttcccatagtaacgccaatagggactttccattgacgtcaatgggtggagtatttacggtaaactgcccacttggcagtacatcaagtgtatcatatgccaagtacgccccctattgacgtcaatgacggtaaatggcccgcctggcattatgcccagtacatgaccttatgggactttcctacttggcagtacatctacgtattagtcatcgctattaccatggtgatgcggttttggcagtacatcaatgggcgtggatagcggtttgactcacggggatttccaagtctccaccccattgacgtcaatgggagtttgttttggcaccaaaatcaacgggactttccaaaatgtcgtaacaactccgccccattgacgcaaatgggcggtaggcgtgtacggtgggaggtctatataagcagagctctctggctaactagagaacccactgcttactggcttatcgaaattaatacgactcactatagggagacccaagctggctagcgtttaaacttaagcttgccggtgccaccatggtgagcaagggcgaggaggataacatggccatcatcaaggagttcatgcgcttcaaggtgcacatggagggctccgtgaacggccacgagttcgagatcgagggcgagggcgagggccgcccctacgagggcacccagaccgccaagctgaaggtgaccaagggtggccccctgcccttcgcctgggacatcctgtcccctcagttcatgtacggctccaaggcctacgtgaagcaccccgccgacatccccgactacttgaagctgtccttccccgagggcttcaagtgggagcgcgtgatgaacttcgaggacggcggcgtggtgaccgtgacccaggactcctccctgcaggacggcgagttcatctacaaggtgaagctgcgcggcaccaacttcccctccgacggccccgtaatgcagaagaagaccatgggctgggaggcctcctccgagcggatgtaccccgaggacggcgccctgaagggcgagatcaagcagaggctgaagctgaaggacggcggccactacgacgctgaggtcaagaccacctacaaggccaagaagcccgtgcagctgcccggcgcctacaacgtcaacatcaagttggacatcacctcccacaacgaggactacaccatcgtggaacagtacgaacgcgccgagggccgccactccaccggcggcatggacgagctgtacaagtacccatacgatgttccagattacgcttaagaattctgcagatatccagcacagtggcggccgctcgagtctagagggcccgtttaaacccgctgatcagcctcgactgtgccttctagttgccagccatctgttgtttgcccctcccccgtgccttccttgaccctggaaggtgccactcccactgtcctttcctaataaaatgaggaaattgcatcgcattgtctgagtaggtgtcattctattctggggggtggggtggggcaggacagcaagggggaggattgggaagacaatagcaggcatgctggggatgcggtgggctctatggcttctgaggcggaaagaaccagctggggctctagggggtatccccacgcgccctgtagcggcgcattaagcgcggcgggtgtggtggttacgcgcagcgtgaccgctacacttgccagcgccctagcgcccgctcctttcgctttcttcccttcctttctcgccacgttcgccggctttccccgtcaagctctaaatcgggggctccctttagggttccgatttagtgctttacggcacctcgaccccaaaaaacttgattagggtgatggttcacgtagtgggccatcgccctgatagacggtttttcgccctttgacgttggagtccacgttctttaatagtggactcttgttccaaactggaacaacactcaaccctatctcggtctattcttttgatttataagggattttgccgatttcggcctattggttaaaaaatgagctgatttaacaaaaatttaacgcgaattaattctgtggaatgtgtgtcagttagggtgtggaaagtccccaggctccccagcaggcagaagtatgcaaagcatgcatctcaattagtcagcaaccaggtgtggaaagtccccaggctccccagcaggcagaagtatgcaaagcatgcatctcaattagtcagcaaccatagtcccgcccctaactccgcccatcccgcccctaactccgcccagttccgcccattctccgccccatggctgactaattttttttatttatgcagaggccgaggccgcctctgcctctgagctattccagaagtagtgaggaggcttttttggaggcctaggcttttgcaaaaagctcccgggagcttgtatatccattttcggatctgatcaagagacaggatgaggatcgtttcgcatgattgaacaagatggattgcacgcaggttctccggccgcttgggtggagaggctattcggctatgactgggcacaacagacaatcggctgctctgatgccgccgtgttccggctgtcagcgcaggggcgcccggttctttttgtcaagaccgacctgtccggtgccctgaatgaactgcaggacgaggcagcgcggctatcgtggctggccacgacgggcgttccttgcgcagctgtgctcgacgttgtcactgaagcgggaagggactggctgctattgggcgaagtgccggggcaggatctcctgtcatctc

SEQ ID NO: 589 - DNA, 8924 bp, Artificial Sequence
  Synthetic Oligonucleotide
agaacatgtgagcaaaaggccagcaaaaggccaggaaccgtaaaaaggccgcgttgctggcgtttttccataggctccgcccccctgacgagcatcacaaaaatcgacgctcaagtcagaggtggcgaaacccgacaggactataaagataccaggcgtttccccctggaagctccctcgtgcgctctcctgttccgaccctgccgcttaccggatacctgtccgcctttctcccttcgggaagcgtggcgctttctcatagctcacgctgtaggtatctcagttcggtgtaggtcgttcgctccaagctgggctgtgtgcacgaaccccccgttcagcccgaccgctgcgccttatccggtaactatcgtcttgagtccaacccggtaagacacgacttatcgccactggcagcagccactggtaacaggattagcagagcgaggtatgtaggcggtgctacagagttcttgaagtggtggcctaactacggctacactagaagaacagtatttggtatctgcgctctgctgaagccagttaccttcggaaaaagagttggtagctcttgatccggcaaacaaaccaccgctggtagcggtggtttttttgtttgcaagcagcagattacgcgcagaaaaaaaggatctcaagaagatcctttgatcttttctacggggtctgacgctcagtggaacgaaaactcacgttaagggattttggtcatgagattatcaaaaaggatcttcacctagatccttttaaattaaaaatgaagttttaaatcaatctaaagtatatatgagtaaacttggtctgacagttaccaatgcttaatcagtgaggcacctatctcagcgatctgtctatttcgttcatccatagttgcctgactccccgtcgtgtagataactacgatacgggagggcttaccatctggccccagtgctgcaatgataccgcgagacccacgctcaccggctccagatttatcagcaataaaccagccagccggaagggccgagcgcagaagtggtcctgcaactttatccgcctccatccagtctattaattgttgccgggaagctagagtaagtagttcgccagttaatagtttgcgcaacgttgttgccattgctacaggcatcgtggtgtcacgctcgtcgtttggtatggcttcattcagctccggttcccaacgatcaaggcgagttacatgatcccccatgttgtgcaaaaaagcggttagctccttcggtcctccgatcgttgtcagaagtaagttggccgcagtgttatcactcatggttatggcagcactgcataattctcttactgtcatgccatccgtaagatgcttttctgtgactggtgagtactcaaccaagtcattctgagaatagtgtatgcggcgaccgagttgctcttgcccggcgtcaatacgggataataccgcgccacatagcagaactttaaaagtgctcatcattggaaaacgttcttcggggcgaaaactctcaaggatcttaccgctgttgagatccagttcgatgtaacccactcgtgcacccaactgatcttcagcatcttttactttcaccagcgtttctgggtgagcaaaaacaggaaggcaaaatgccgcaaaaaagggaataagggcgacacggaaatgttgaatactcatactcttcctttttcaatattattgaagcatttatcagggttattgtctcatgagcggatacatatttgaatgtatttagaaaaataaacaaataggggttccgcgcacatttccccgaaaagtgccacctgacgtcgacggatcgggagatctcccgatcccctatggtgcactctcagtacaatctgctctgatgccgcatagttaagccagtatctgctccctgcttgtgtgttggaggtcgctgagtagtgcgcgagcaaaatttaagctacaacaaggcaaggcttgaccgacaattgcatgaagaatctgcttagggttaggcgttttgcgctgcttcgcgatgtacgggccagatatacgcgttgacattgattattgactagttattaatagtaatcaattacggggtcattagttcatagcccatatatggagttccgcgttacataacttacggtaaatggcccgcctggctgaccgcccaacgacccccgcccattgacgtcaataatgacgtatgttcccatagtaacgccaatagggactttccattgacgtcaatgggtggagtatttacggtaaactgcccacttggcagtacatcaagtgtatcatatgccaagtacgccccctattgacgtcaatgacggtaaatggcccgcctggcattatgcccagtacatgaccttatgggactttcctacttggcagtacatctacgtattagtcatcgctattaccatggtgatgcggttttggcagtacatcaatgggcgtggatagcggtttgactcacggggatttccaagtctccaccccattgacgtcaatgggagtttgttttggcaccaaaatcaacgggactttccaaaatgtcgtaacaactccgccccattgacgcaaatgggcggtaggcgtgtacggtgggaggtctatataagcagagctctctggctaactagagaacccactgcttactggcttatcgaaattaatacgactcactatagggagacccaagctggctagcgtttaaacttaagcttgccaccatggccccaaagaagaagcggaaggtcggtatccacggagtcccagcagccggatccgccaccagatccttcatcctgaagatcgagcccaacgaggaagtgaagaaaggcctctggaaaacccacgaggtgctgaaccacggaatcgcctactacatgaatatcctgaagctgatccggcaagaggccatctacgagcaccacgagcaggaccccaagaatcccaagaaggtgtccaaggccgagatccaggccgagctgtgggatttcgtgctgaagatgcagaagtgcaacagcttcacacacgaggtggacaaggacgaggtgttcaacatcctgagagagctgtacgaggaactggtgcccagcagcgtggaaaagaagggcgaagccaaccagctgagcaacaagtttctgtaccctctggtggaccccaacagccagtctggaaagggaacagccagcagcggcagaaagcccagatggtacaacctgaagattgccggcgatccctcctgggaagaagagaagaagaagtgggaagaagataagaaaaaggacccgctggccaagatcctgggcaagctggctgagtacggactgatccctctgttcatcccctacaccgacagcaacgagcccatcgtgaaagaaatcaagtggatggaaaagtcccggaaccagagcgtgcggcggctggataaggacatgttcattcaggccctggaacggttcctgagctgggagagctggaacctgaaagtgaaagaggaatacgagaaggtcgagaaagagtacaagaccctggaagagaggatcaaagaggacatccaggctctgaaggctctggaacagtatgagaaagagcggcaagaacagctgctgcgggacaccctgaacaccaacgagtaccggctgagcaagagaggccttagaggctggcgggaaatcatccagaaatggctgaaaatggacgagaacgagccctccgagaagtacctggaagtgttcaaggactaccagcggaagcaccctagagaggccggcgattacagcgtgtacgagttcctgtccaagaaagagaaccacttcatctggcggaatcaccctgagtacccctacctgtacgccaccttctgcgagatcgacaagaaaaagaaggacgccaagcagcaggccaccttcacactggccgatcctatcaatcaccctctgtgggtccgattcgaggaaagaagcggcagcaacctgaacaagtacagaatcctgaccgagcagctgcacaccgagaagctgaagaaaaagctgacagtgcagctggaccggctgatctaccctacagaatctggcggctgggaagagaagggcaaagtggacattgtgctgctgcccagccggcagttctacaaccagatcttcctggacatcgaggaaaagggcaagcacgccttcacctacaaggatgagagcatcaagttccctctgaagggcacactcggcggagccagagtgcagttcgacagagatcacctgagaagataccctcacaaggtggaaagcggcaacgtgggcagaatctacttcaacatgaccgtgaacatcgagcctacagagtccccagtgtccaagtctctgaagatccaccgggacgacttccccaaggtggtcaacttcaagcccaaagaactgaccgagtggatcaaggacagcaagggcaagaaactgaagtccggcatcgagtccctggaaatcggcctgagagtgatgagcatcgacctgggacagagacaggccgctgccgcctctattttcgaggtggtggatcagaagcccgacatcgaaggcaagctgtttttcccaatcaagggcaccgagctgtatgccgtgcacagagccagcttcaacatcaagctgcccggcgagacactggtcaagagcagagaagtgctgcggaaggccagagaggacaatctgaaactgatgaaccagaagctcaacttcctgcggaacgtgctgcacttccagcagttcgaggacatcaccgagagagagaagcgggtcaccaagtggatcagcagacaagagaacagcgacgtgcccctggtgtaccaggatgagctgatccagatccgcgagctgatgtacaagccttacaaggactgggtcgccttcctgaagcagctccacaagagactggaagtcgagatcggcaaagaagtgaagcactggcggaagtccctgagcgacggaagaaagggcctgtacggcatctccctgaagaacatcgacgagatcgatcggacccggaagttcctgctgagatggtccctgaggcctaccgaacctggcgaagtgcgtagactggaacccggccagagattcgccatcgaccagctgaatcacctgaacgccctgaaagaagatcggctgaagaagatggccaacaccatcatcatgcacgccctgggctactgctacgacgtgcggaagaagaaatggcaggctaagaaccccgcctgccagatcatcctgttcgaggatctgagcaactacaacccctacggagaaaggtcccgcttcgagaacagccggctcatgaagtggtccagacgcgagatccccagacaggttgcactgcagggcgagatctatggcctgcaagtgggagaagtgggcgctcagttcagcagcagattccacgccaagacaggcagccctggcatcagatgtcgggtcgtgaccaaagagaagctgcaggacaatcggttcttcaagaatctgcagagagagggcagactgaccctggacaaaatcgccgtgctgaaagagggcgatctgtacccagacaaaggcggcgagaagttcatcagcctgagcaaggatcggaagtgcgtgaccacacacgccgacatcaacgccgctcagaacctgcagaagcggttctggacaagaacccacggcttctacaaggtgtactgcaaggcctaccaggtggacggccagaccgtgtacatccctgagagcaaggaccagaagcagaagatcatcgaagagttcggcgagggctacttcattctgaaggacggggtgtacgaatgggtcaacgccggcaagctgaaaatcaagaagggcagctccaagcagagcagcagcgagctggtggatagcgacatcctgaaagacagcttcgacctggcctccgagctgaaaggcgaaaagctgatgctgtacagggaccccagcggcaatgtgttccccagcgacaaatggatggccgctggcgtgttcttcggaaagctggaacgcatcctgatcagcaagctgaccaaccagtactccatcagcaccatcgaggacgacagcagcaagcagtctatgggatccaaaaggccggcggccacgaaaaaggccggccaggcaaaaaagaaaaagggatcttacccatacgatgttccagattacgcttatccctacgacgtgcctgattatgcatacccatatgatgtccccgactatgcctaagaattctgcagatatccagcacagtggcggccgctcgagtctagagggcccgtttaaacccgctgatcagcctcgactgtgccttctagttgccagccatctgttgtttgcccctcccccgtgccttccttgaccctggaaggtgccactcccactgtcctttcctaataaaatgaggaaattgcatcgcattgtctgagtaggtgtcattctattctggggggtggggtggggcaggacagcaagggggaggattgggaagacaatagcaggcatgctggggatgcggtgggctctatggcttctgaggcggaaagaaccagctggggctctagggggtatccccacgcgccctgtagcggcgcattaagcgcggcgggtgtggtggttacgcgcagcgtgaccgctacacttgccagcgccctagcgcccgctcctttcgctttcttcccttcctttctcgccacgttcgccggctttccccgtcaagctctaaatcgggggctccctttagggttccgatttagtgctttacggcacctcgaccccaaaaaacttgattagggtgatggttcacgtagtgggccatcgccctgatagacggtttttcgccctttgacgttggagtccacgttctttaatagtggactcttgttccaaactggaacaacactcaaccctatctcggtctattcttttgatttataagggattttgccgatttcggcctattggttaaaaaatgagctgatttaacaaaaatttaacgcgaattaattctgtggaatgtgtgtcagttagggtgtggaaagtccccaggctccccagcaggcagaagtatgcaaagcatgcatctcaattagtcagcaaccaggtgtggaaagtccccaggctccccagcaggcagaagtatgcaaagcatgcatctcaattagtcagcaaccatagtcccgcccctaactccgcccatcccgcccctaactccgcccagttccgcccattctccgccccatggctgactaattttttttatttatgcagaggccgaggccgcctctgcctctgagctattccagaagtagtgaggaggcttttttggaggcctaggcttttgcaaaaagctcccgggagcttgtatatccattttcggatctgatcaagagacaggatgaggatcgtttcgcatgattgaacaagatggattgcacgcaggttctccggccgcttgggtggagaggctattcggctatgactgggcacaacagacaatcggctgctctgatgccgccgtgttccggctgtcagcgcaggggcgcccggttctttttgtcaagaccgacctgtccggtgccctgaatgaactgcaggacgaggcagcgcggctatcgtggctggccacgacgggcgttccttgcgcagctgtgctcgacgttgtcactgaagcgggaagggactggctgctattgggcgaagtgccggggcaggatctcctgtcatctcaccttgctcctgccgagaaagtatccatcatggctgatgcaatgcggcggctgcatacgcttgatccggctacctgcccattcgaccaccaagcgaaacatcgcatcgagcgagcacgtactcggatggaagccggtcttgtcgatcaggatgatctggacgaagagcatcaggggctcgcgccagccgaactgttcgccaggctcaaggcgcgcatgcccgacggcgaggatctcgtcgtgacccatggcgatgcctgcttgccgaatatcatggtggaaaatggccgcttttctggattcatcgactgtggccggctgggtgtggcggaccgctatcaggacatagcgttggctacccgtgatattgctgaagagcttggcggcgaatgggctgaccgcttcctcgtgctttacggtatcgccgctcccgattcgcagcgcatcgccttctatcgccttcttgacgagttcttctgagcgggactctggggttcgaaatgaccgaccaagcgacgcccaacctgccatcacgagatttcgattccaccgccgccttctatgaaaggttgggcttcggaatcgttttccgggacgccggctggatgatcctccagcgcggggatctcatgctggagttcttcgcccaccccaacttgtttattgcagcttataatggttacaaataaagcaatagcatcacaaatttcacaaataaagcatttttttcactgcattctagttgtggtttgtccaaactcatcaatgtatcttatcatgtctgtataccgtcgacctctagctagagcttggcgtaatcatggtcatagctgtttcctgtgtgaaattgttatccgctcacaattccacacaacatacgagccggaagcataaagtgtaaagcctggggtgcctaatgagtgagctaactcacattaattgcgttgcgctcactgcccgctttccagtcgggaaacctgtcgtgccagctgcattaatgaatcggccaacgcgcggggagaggcggtttgcgtattgggcgctcttccgcttcctcgctcactgactcgctgcgctcggtcgttcggctgcggcgagcggtatcagctcactcaaaggcggtaatacggttatccacagaatcaggggataacgcaggaa

SEQ ID NO: 590 - DNA, 8924 bp, Artificial Sequence
  Synthetic Oligonucleotide
agaacatgtgagcaaaaggccagcaaaaggccaggaaccgtaaaaaggccgcgttgctggcgtttttccataggctccgcccccctgacgagcatcacaaaaatcgacgctcaagtcagaggtggcgaaacccgacaggactataaagataccaggcgtttccccctggaagctccctcgtgcgctctcctgttccgaccctgccgcttaccggatacctgtccgcctttctcccttcgggaagcgtggcgctttctcatagctcacgctgtaggtatctcagttcggtgtaggtcgttcgctccaagctgggctgtgtgcacgaaccccccgttcagcccgaccgctgcgccttatccggtaactatcgtcttgagtccaacccggtaagacacgacttatcgccactggcagcagccactggtaacaggattagcagagcgaggtatgtaggcggtgctacagagttcttgaagtggtggcctaactacggctacactagaagaacagtatttggtatctgcgctctgctgaagccagttaccttcggaaaaagagttggtagctcttgatccggcaaacaaaccaccgctggtagcggtggtttttttgtttgcaagcagcagattacgcgcagaaaaaaaggatctcaagaagatcctttgatcttttctacggggtctgacgctcagtggaacgaaaactcacgttaagggattttggtcatgagattatcaaaaaggatcttcacctagatccttttaaattaaaaatgaagttttaaatcaatctaaagtatatatgagtaaacttggtctgacagttaccaatgcttaatcagtgaggcacctatctcagcgatctgtctatttcgttcatccatagttgcctgactccccgtcgtgtagataactacgatacgggagggcttaccatctggccccagtgctgcaatgataccgcgagacccacgctcaccggctccagatttatcagcaataaaccagccagccggaagggccgagcgcagaagtggtcctgcaactttatccgcctccatccagtctattaattgttgccgggaagctagagtaagtagttcgccagttaatagtttgcgcaacgttgttgccattgctacaggcatcgtggtgtcacgctcgtcgtttggtatggcttcattcagctccggttcccaacgatcaaggcgagttacatgatcccccatgttgtgcaaaaaagcggttagctccttcggtcctccgatcgttgtcagaagtaagttggccgcagtgttatcactcatggttatggcagcactgcataattctcttactgtcatgccatccgtaagatgcttttctgtgactggtgagtactcaaccaagtcattctgagaatagtgtatgcggcgaccgagttgctcttgcccggcgtcaatacgggataataccgcgccacatagcagaactttaaaagtgctcatcattggaaaacgttcttcggggcgaaaactctcaaggatcttaccgctgttgagatccagttcgatgtaacccactcgtgcacccaactgatcttcagcatcttttactttcaccagcgtttctgggtgagcaaaaacaggaaggcaaaatgccgcaaaaaagggaataagggcgacacggaaatgttgaatactcatactcttcctttttcaatattattgaagcatttatcagggttattgtctcatgagcggatacatatttgaatgtatttagaaaaataaacaaataggggttccgcgcacatttccccgaaaagtgccacctgacgtcgacggatcgggagatctcccgatcccctatggtgcactctcagtacaatctgctctgatgccgcatagttaagccagtatctgctccctgcttgtgtgttggaggtcgctgagtagtgcgcgagcaaaatttaagctacaacaaggcaaggcttgaccgacaattgcatgaagaatctgcttagggttaggcgttttgcgctgcttcgcgatgtacgggccagatatacgcgttgacattgattattgactagttattaatagtaatcaattacggggtcattagttcatagcccatatatggagttccgcgttacataacttacggtaaatggcccgcctggctgaccgcccaacgacccccgcccattgacgtcaataatgacgtatgttcccatagtaacgccaatagggactttccattgacgtcaatgggtggagtatttacggtaaactgcccacttggcagtacatcaagtgtatcatatgccaagtacgccccctattgacgtcaatgacggtaaatggcccgcctggcattatgcccagtacatgaccttatgggactttcctacttggcagtacatctacgtattagtcatcgctattaccatggtgatgcggttttggcagtacatcaatgggcgtggatagcggtttgactcacggggatttccaagtctccaccccattgacgtcaatgggagtttgttttggcaccaaaatcaacgggactttccaaaatgtcgtaacaactccgccccattgacgcaaatgggcggtaggcgtgtacggtgggaggtctatataagcagagctctctggctaactagagaacccactgcttactggcttatcgaaattaatacgactcactatagggagacccaagctggctagcgtttaaacttaagcttgccaccatggccccaaagaagaagcggaaggtcggtatccacggagtcccagcagccggatccgccaccagatccttcatcctgaagatcgagcccaacgaggaagtgaagaaaggcctctggaaaacccacgaggtgctgaaccacggaatcgcctactacatgaatatcctgaagctgatccggcaagaggccatctacgagcaccacgagcaggaccccaagaatcccaagaaggtgtccaaggccgagatccaggccgagctgtgggatttcgtgctgaagatgcagaagtgcaacagcttcacacacgaggtggacaaggacgaggtgttcaacatcctgagagagctgtacgaggaactggtgcccagcagcgtggaaaagaagggcgaagccaaccagctgagcaacaagtttctgtaccctctggtggaccccaacagccagtctggaaagggaacagccagcagcggcagaaagcccagatggtacaacctgaagattgccggcgatccctcctgggaagaagagaagaagaagtgggaagaagataagaaaaaggacccgctggccaagatcctgggcaagctggctgagtacggactgatccctctgttcatcccctacaccgacagcaacgagcccatcgtgaaagaaatcaagtggatggaaaagtcccggaaccagagcgtgcggcggctggataaggacatgttcattcaggccctggaacggttcctgagctgggagagctggaacctgaaagtgaaagaggaatacgagaaggtcgagaaagagtacaagaccctggaagagaggatcaaagaggacatccaggctctgaaggctctggaacagtatgagaaagagcggcaagaacagctgctgcgggacaccctgaacaccaacgagtaccggctgagcaagagaggccttagaggctggcgggaaatcatccagaaatggctgaaaatggacgagaacgagccctccgagaagtacctggaagtgttcaaggactaccagcggaagcaccctagagaggccggcgattacagcgtgtacgagttcctgtccaagaaagagaaccacttcatctggcggaatcaccctgagtacccctacctgtacgccaccttctgcgagatcgacaagaaaaagaaggacgccaagcagcaggccaccttcacactggccgatcctatcaatcaccctctgtgggtccgattcgaggaaagaagcggcagcaacctgaacaagtacagaatcctgaccgagcagctgcacaccgagaagctgaagaaaaagctgacagtgcagctggaccggctgatctaccctacagaatctggcggctgggaagagaagggcaaagtggacattgtgctgctgcccagccggcagttctacaaccagatcttcctggacatcgaggaaaagggcaagcacgccttcacctacaaggatgagagcatcaagttccctctgaagggcacactcggcggagccagagtgcagttcgacagagatcacctgagaagataccctcacaaggtggaaagcggcaacgtgggcagaatctacttcaacatgaccgtgaacatcgagcctacagagtccccagtgtccaagtctctgaagatccaccgggacgacttccccaaggtggtcaacttcaagcccaaagaactgaccgagtggatcaaggacagcaagggcaagaaactgaagtccggcatcgagtccctggaaatcggcctgagagtgatgagcatcgacctgggacagagacaggccgctgccgcctctattttcgaggtggtggatcagaagcccgacatcgaaggcaagctgtttttcccaatcaagggcaccgagctgtatgccgtgcacagagccagcttcaacatcaagctgcccggcgagacactggtcaagagcagagaagtgctgcggaaggccagagaggacaatctgaaactgatgaaccagaagctcaacttcctgcggaacgtgctgcacttccagcagttcgaggacatcaccgagagagagaagcgggtcaccaagtggatcagcagacaagagaacagcgacgtgcccctggtgtaccaggatgagctgatccagatccgcgagctgatgtacaagccttacaaggactgggtcgccttcctgaagcagctccacaagagactggaagtcgagatcggcaaagaagtgaagcactggcggaagtccctgagcgacggaagaaagggcctgtacggcatctccctgaagaacatcgacgagatcgatcggacccggaagttcctgctgagatggtccctgaggcctaccgaacctggcgaagtgcgtagactggaacccggccagagattcgccatcgaccagctgaatcacctgaacgccctgaaagaagatcggctgaagaagatggccaacaccatcatcatgcacgccctgggctactgctacgacgtgcggaagaagaaatggcaggctaagaaccccgcctgccagatcatcctgttcgaggatctgagcaactacaacccctacaaggaaaggtcccgcttcgagaacagccggctcatgaagtggtccagacgcgagatccccagacaggttgcactgcagggcgagatctatggcctgcaagtgggagaagtgggcgctcagttcagcagcagattccacgccaagacaggcagccctggcatcagatgtcgggtcgtgaccaaagagaagctgcaggacaatcggttcttcaagaatctgcagagagagggcagactgaccctggacaaaatcgccgtgctgaaagagggcgatctgtacccagacaaaggcggcgagaagttcatcagcctgagcaaggatcggaagtgcgtgaccacacacgccgacatcaacgccgctcagaacctgcagaagcggttctggacaagaacccacggcttctacaaggtgtactgcaaggcctaccaggtggacggccagaccgtgtacatccctgagagcaaggaccagaagcagaagatcatcgaagagttcggcgagggctacttcattctgaaggacggggtgtacgaatgggtcaacgccggcaagctgaaaatcaagaagggcagctccaagcagagcagcagcgagctggtggatagcgacatcctgaaagacagcttcgacctggcctccgagctgaaaggcgaaaagctgatgctgtacagggaccccagcggcaatgtgttccccagcgacaaatggatggccgctggcgtgttcttcggaaagctggaacgcatcctgatcagcaagctgaccaaccagtactccatcagcaccatcgaggacgacagcagcaagcagtctatgggatccaaaaggccggcggccacgaaaaaggccggccaggcaaaaaagaaaaagggatcttacccatacgatgttccagattacgcttatccctacgacgtgcctgattatgcatacccatatgatgtccccgactatgcctaagaattctgcagatatccagcacagtggcggccgctcgagtctagagggcccgtttaaacccgctgatcagcctcgactgtgccttctagttgccagccatctgttgtttgcccctcccccgtgccttccttgaccctggaaggtgccactcccactgtcctttcctaataaaatgaggaaattgcatcgcattgtctgagtaggtgtcattctattctggggggtggggtggggcaggacagcaagggggaggattgggaagacaatagcaggcatgctggggatgcggtgggctctatggcttctgaggcggaaagaaccagctggggctctagggggtatccccacgcgccctgtagcggcgcattaagcgcggcgggtgtggtggttacgcgcagcgtgaccgctacacttgccagcgccctagcgcccgctcctttcgctttcttcccttcctttctcgccacgttcgccggctttccccgtcaagctctaaatcgggggctccctttagggttccgatttagtgctttacggcacctcgaccccaaaaaacttgattagggtgatggttcacgtagtgggccatcgccctgatagacggtttttcgccctttgacgttggagtccacgttctttaatagtggactcttgttccaaactggaacaacactcaaccctatctcggtctattcttttgatttataagggattttgccgatttcggcctattggttaaaaaatgagctgatttaacaaaaatttaacgcgaattaattctgtggaatgtgtgtcagttagggtgtggaaagtccccaggctccccagcaggcagaagtatgcaaagcatgcatctcaattagtcagcaaccaggtgtggaaagtccccaggctccccagcaggcagaagtatgcaaagcatgcatctcaattagtcagcaaccatagtcccgcccctaactccgcccatcccgcccctaactccgcccagttccgcccattctccgccccatggctgactaattttttttatttatgcagaggccgaggccgcctctgcctctgagctattccagaagtagtgaggaggcttttttggaggcctaggcttttgcaaaaagctcccgggagcttgtatatccattttcggatctgatcaagagacaggatgaggatcgtttcgcatgattgaacaagatggattgcacgcaggttctccggccgcttgggtggagaggctattcggctatgactgggcacaacagacaatcggctgctctgatgccgccgtgttccggctgtcagcgcaggggcgcccggttctttttgtcaagaccgacctgtccggtgccctgaatgaactgcaggacgaggcagcgcggctatcgtggctggccacgacgggcgttccttgcgcagctgtgctcgacgttgtcactgaagcgggaagggactggctgctattgggcgaagtgccggggcaggatctcctgtcatctcaccttgctcctgccgagaaagtatccatcatggctgatgcaatgcggcggctgcatacgcttgatccggctacctgcccattcgaccaccaagcgaaacatcgcatcgagcgagcacgtactcggatggaagccggtcttgtcgatcaggatgatctggacgaagagcatcaggggctcgcgccagccgaactgttcgccaggctcaaggcgcgcatgcccgacggcgaggatctcgtcgtgacccatggcgatgcctgcttgccgaatatcatggtggaaaatggccgcttttctggattcatcgactgtggccggctgggtgtggcggaccgctatcaggacatagcgttggctacccgtgatattgctgaagagcttggcggcgaatgggctgaccgcttcctcgtgctttacggtatcgccgctcccgattcgcagcgcatcgccttctatcgccttcttgacgagttcttctgagcgggactctggggttcgaaatgaccgaccaagcgacgcccaacctgccatcacgagatttcgattccaccgccgccttctatgaaaggttgggcttcggaatcgttttccgggacgccggctggatgatcctccagcgcggggatctcatgctggagttcttcgcccaccccaacttgtttattgcagcttataatggttacaaataaagcaatagcatcacaaatttcacaaataaagcatttttttcactgcattctagttgtggtttgtccaaactcatcaatgtatcttatcatgtctgtataccgtcgacctctagctagagcttggcgtaatcatggtcatagctgtttcctgtgtgaaattgttatccgctcacaattccacacaacatacgagccggaagcataaagtgtaaagcctggggtgcctaatgagtgagctaactcacattaattgcgttgcgctcactgcccgctttccagtcgggaaacctgtcgtgccagctgcattaatgaatcggccaacgcgcggggagaggcggtttgcgtattgggcgctcttccgcttcctcgctcactgactcgctgcgctcggtcgttcggctgcggcgagcggtatcagctcactcaaaggcggtaatacggttatccacagaatcaggggataacgcaggaa

SEQ ID NO: 591 - DNA, 31 bp, Artificial Sequence
  Synthetic Oligonucleotide
gagaagtcatttaataaggccactgttaaaa

SEQ ID NO: 592 - DNA, 23 bp, Artificial Sequence
  Synthetic Oligonucleotide
agacccagaggctcaagtgagca

SEQ ID NO: 593 - DNA, 23 bp, Artificial Sequence
  Synthetic Oligonucleotide
agctgaagggaaataaaaggaaa

SEQ ID NO: 594 - DNA, 23 bp, Artificial Sequence
  Synthetic Oligonucleotide
tctcccctgggaagcatccctgg

SEQ ID NO: 595 - DNA, 23 bp, Artificial Sequence
  Synthetic Oligonucleotide
tcatggagaaaatattcagaatc

SEQ ID NO: 596 - DNA, 23 bp, Artificial Sequence
  Synthetic Oligonucleotide
cctcactcctgctcggtgaattt

SEQ ID NO: 597 - DNA, 23 bp, Artificial Sequence
  Synthetic Oligonucleotide
aggagtgttcagtctccgtgaac

SEQ ID NO: 598 - DNA, 23 bp, Artificial Sequence
  Synthetic Oligonucleotide
ggaggtcagaaatagggggtcca

SEQ ID NO: 599 - DNA, 23 bp, Artificial Sequence
  Synthetic Oligonucleotide
caaagcccattccctctttagcc

SEQ ID NO: 600 - DNA, 23 bp, Artificial Sequence
  Synthetic Oligonucleotide
cccttcagctaaaataaaggagg

SEQ ID NO: 601 - DNA, 23 bp, Artificial Sequence
  Synthetic Oligonucleotide
ttctcccctgggaagcatccctg

SEQ ID NO: 602 - DNA, 23 bp, Artificial Sequence
  Synthetic Oligonucleotide
tgcagagcaaataccagagataa

SEQ ID NO: 603 - DNA, 23 bp, Artificial Sequence
  Synthetic Oligonucleotide
cgccgggccctgaccacgctcat

SEQ ID NO: 604 - DNA, 23 bp, Artificial Sequence
  Synthetic Oligonucleotide
ccgacttcatctttgccaacgtc

SEQ ID NO: 605 - DNA, 23 bp, Artificial Sequence
  Synthetic Oligonucleotide
tagagcactggcatggggatggg

SEQ ID NO: 606 - DNA, 23 bp, Artificial Sequence
  Synthetic Oligonucleotide
ttgctccagaggccccccttggg

SEQ ID NO: 607 - DNA, 23 bp, Artificial Sequence
  Synthetic Oligonucleotide
ctggtgccagaaacaggggtgac

SEQ ID NO: 608 - DNA, 23 bp, Artificial Sequence
  Synthetic Oligonucleotide
tgggcttcaagcaacttgtagtg

SEQ ID NO: 609 - DNA, 23 bp, Artificial Sequence
  Synthetic Oligonucleotide
tgtaattggttctaccaaagaag

SEQ ID NO: 610 - DNA, 23 bp, Artificial Sequence
  Synthetic Oligonucleotide
agaggcggagggcggcgtgcctg

SEQ ID NO: 611 - DNA, 23 bp, Artificial Sequence
  Synthetic Oligonucleotide
cttcagcccaagaacagtacaag

SEQ ID NO: 612 - DNA, 23 bp, Artificial Sequence
  Synthetic Oligonucleotide
tctgtgagtcgaggagaaacgac

SEQ ID NO: 613 - DNA, 23 bp, Artificial Sequence
  Synthetic Oligonucleotide
cttgggtgtgttaaaagtgacca

SEQ ID NO: 614 - DNA, 20 bp, Artificial Sequence
  Synthetic Oligonucleotide
tcactcctgctcggtgaatt

SEQ ID NO: 615 - DNA, 20 bp, Artificial Sequence
  Synthetic Oligonucleotide
gctacaggcagagacaaagg

SEQ ID NO: 616 - DNA, 20 bp, Artificial Sequence
  Synthetic Oligonucleotide
aggtcagaaatagggggtcc

SEQ ID NO: 617 - DNA, 20 bp, Artificial Sequence
  Synthetic Oligonucleotide
caggctgtgaaccttggtgg

SEQ ID NO: 618 - DNA, 20 bp, Artificial Sequence
  Synthetic Oligonucleotide
gaccccctccaccccgcctc

SEQ ID NO: 619 - DNA, 21 bp, Artificial Sequence
  Synthetic Oligonucleotide
gtatctagcctcttctaagac

SEQ ID NO: 620 - DNA, 20 bp, Artificial Sequence
  Synthetic Oligonucleotide
tctcccctgggaagcatccc

SEQ ID NO: 621 - DNA, 20 bp, Artificial Sequence
  Synthetic Oligonucleotide
gagtccgagcagaagaagaa

SEQ ID NO: 622 - DNA, 20 bp, Artificial Sequence
  Synthetic Oligonucleotide
ttttgggagtaagaaaaggt

SEQ ID NO: 623 - DNA, 20 bp, Artificial Sequence
  Synthetic Oligonucleotide
agtgtccagggatgcttccc

SEQ ID NO: 624 - DNA, 23 bp, Artificial Sequence
  Synthetic Oligonucleotide
cctcactcctgctcggtgaattt

SEQ ID NO: 625 - DNA, 23 bp, Artificial Sequence
  Synthetic Oligonucleotide
ggaggtcagaaatagggggtcca

SEQ ID NO: 626 - DNA, 23 bp, Artificial Sequence
  Synthetic Oligonucleotide
gatggcgacttcaggcacaggat

SEQ ID NO: 627 - DNA, 23 bp, Artificial Sequence
  Synthetic Oligonucleotide
ggaagtgtccagggatgcttccc

SEQ ID NO: 628 - DNA, 23 bp, Artificial Sequence
  Synthetic Oligonucleotide
cccttcagctaaaataaaggagg

SEQ ID NO: 629 - DNA, 23 bp, Artificial Sequence
  Synthetic Oligonucleotide
ggctcagcaggcacctgcctcag

SEQ ID NO: 630 - DNA, 23 bp, Artificial Sequence
  Synthetic Oligonucleotide
gggactggagttgcttcatgtac

SEQ ID NO: 631 - DNA, 23 bp, Artificial Sequence
  Synthetic Oligonucleotide
tctccatgaaaaatactggggtc

SEQ ID NO: 632 - DNA, 23 bp, Artificial Sequence
  Synthetic Oligonucleotide
ttcatggagaaaatattcagaat

SEQ ID NO: 633 - DNA, 23 bp, Artificial Sequence
  Synthetic Oligonucleotide
gcagctacaggcagagacaaagg

SEQ ID NO: 634 - DNA, 23 bp, Artificial Sequence
  Synthetic Oligonucleotide
cctggaaaccatccaggccttgt

SEQ ID NO: 635 - DNA, 23 bp, Artificial Sequence
  Synthetic Oligonucleotide
ggtcagctgttaacatcagtacg

SEQ ID NO: 636 - DNA, 23 bp, Artificial Sequence
  Synthetic Oligonucleotide
tcttcacggaaacagggttcctt

SEQ ID NO: 637 - DNA, 23 bp, Artificial Sequence
  Synthetic Oligonucleotide
tggttgcccaccctagtcattgg

SEQ ID NO: 638 - DNA, 23 bp, Artificial Sequence
  Synthetic Oligonucleotide
gatggcgacttcaggcacaggat

SEQ ID NO: 639 - DNA, 23 bp, Artificial Sequence
  Synthetic Oligonucleotide
cctcactcctgctcggtgaattt

SEQ ID NO: 640 - DNA, 23 bp, Artificial Sequence
  Synthetic Oligonucleotide
ggaagtgtccagggatgcttccc

SEQ ID NO: 641 - DNA, 23 bp, Artificial Sequence
  Synthetic Oligonucleotide
ggctcagcaggcacctgcctcag

SEQ ID NO: 642 - DNA, 23 bp, Artificial Sequence
  Synthetic Oligonucleotide
ttcatggagaaaatattcagaat

SEQ ID NO: 643 - DNA, 23 bp, Artificial Sequence
  Synthetic Oligonucleotide
ctgacctcccaaacagctacata

SEQ ID NO: 644 - DNA, 47 bp, Artificial Sequence
  Synthetic Oligonucleotide
  misc_feature (1)..(1): 5' phosphorylated
  misc_feature (1)..(1): 5' phosphorylated
gttgtgagcaagggcgaggaggataacgcctctctcccagcgactat

SEQ ID NO: 645 - DNA, 47 bp, Artificial Sequence
  Synthetic Oligonucleotide
  misc_feature (1)..(1): 5' phosphorylate
atagtcgctgggagagaggcgttatcctcctcgcccttgctcacaac

SEQ ID NO: 646 - DNA, 23 bp, Artificial Sequence
  Synthetic Oligonucleotide
tactttagagcgaaaggcttttc

SEQ ID NO: 647 - DNA, 23 bp, Artificial Sequence
  Synthetic Oligonucleotide
agataccaaagagaacgggatca

SEQ ID NO: 648 - DNA, 23 bp, Artificial Sequence
  Synthetic Oligonucleotide
tgacttcactgtaactgggagag

SEQ ID NO: 649 - DNA, 23 bp, Artificial Sequence
  Synthetic Oligonucleotide
tctcccaggaagggcagcaggct

SEQ ID NO: 650 - DNA, 23 bp, Artificial Sequence
  Synthetic Oligonucleotide
tagacgtggagatcatttttaac

SEQ ID NO: 651 - DNA, 49 bp, Artificial Sequence
  Synthetic Oligonucleotide
aataaaatatctttattttcattacatctgtgtgttggttttttgtgtg

SEQ ID NO: 652 - DNA, 208 bp, Artificial Sequence
  Synthetic Oligonucleotide
ctgtgccttctagttgccagccatctgttgtttgcccctcccccgtgccttccttgaccctggaaggtgccactcccactgtcctttcctaataaaatgaggaaattgcatcgcattgtctgagtaggtgtcattctattctggggggtggggtggggcaggacagcaagggggaggattgggaagagaatagcaggcatgctgggga

SEQ ID NO: 653 - protein, 1190 aa, Artificial Sequence
  Synthetic Peptide
MAPKKKRKVGIHGVPAAAVKSMKVKLRLDNMPEIRAGLWKLHTEVNAGVRYYTEWLSLLRQENLYRRSPNGDGEQECYKTAEECKAELLERLRARQVENGHCGPAGSDDELLQLARQLYELLVPQAIGAKGDAQQIARKFLSPLADKDAVGGLGIAKAGNKPRWVRMREAGEPGWEEEKAKAEARKSTDRTADVLRALADFGLKPLMRVYTDSDMSSVQWKPLRKGQAVRTWDRDMFQQAIERMMSWESWNQRVGEAYAKLVEQKSRFEQKNFVGQEHLVQLVNQLQQDMKEASHGLESKEQTAHYLTGRALRGSDKVFEKWEKLDPDAPFDLYDTEIKNVQRRNTRRFGSHDLFAKLAEPKYQALWREDASFLTRYAVYNSIVRKLNHAKMFATFTLPDATAHPIWTRFDKLGGNLHQYTFLFNEFGEGRHAIRFQKLLTVEDGVAKEVDDVTVPISMSAQLDDLLPRDPHELVALYFQDYGAEQHLAGEFGGAKIQYRRDQLNHLHARRGARDVYLNLSVRVQSQSEARGERRPPYAAVFRLVGDNHRAFVHFDKLSDYLAEHPDDGKLGSEGLLSGLRVMSVDLGLRTSASISVFRVARKDELKPNSEGRVPFCFPIEGNENLVAVHERSQLLKLPGETESKDLRAIREERQRTLRQLRTQLAYLRLLVRCGSEDVGRRERSWAKLIEQPMDANQMTPDWREAFEDELQKLKSLYGICGDREWTEAVYESVRRVWRHMGKQVRDWRKDVRSGERPKIRGYQKDVVGGNSIEQIEYLERQYKFLKSWSFFGKVSGQVIRAEKGSRFAITLREHIDHAKEDRLKKLADRIIMEALGYVYALDDERGKGKWVAKYPPCQLILLEELSEYQFNNDRPPSENNQLMQWSHRGVFQELLNQAQVHDLLVGTMYAAFSSRFDARTGAPGIRCRRVPARCAREQNPEPFPWWLNKFVAEHKLDGCPLRADDLIPTGEGEFFVSPFSAEEGDFHQIHADLNAAQNLQRRLWSDFDISQIRLRCDWGEVDGEPVLIPRTTGKRTADSYGNKVFYTKTGVTYYERERGKKRRKVFAQEELSEEEAELLVEADEAREKSVVLMRDPSGIINRGDWTRQKEFWSMVNQRIEGYLVKQIRSRVRLQESACENTGDIKRPAATKKAGQAKKKKGSYPYDVPDYAYPYDVPDYAYPYDVPDYA

SEQ ID NO: 654 - DNA, 7584 bp, Artificial Sequence
  Synthetic Oligonucleotide
cctgcaggcagctgcgcgctcgctcgctcactgaggccgcccgggcgtcgggcgacctttggtcgcccggcctcagtgagcgagcgagcgcgcagagagggagtggccaactccatcactaggggttcctgcggcctctagactcgaggggctggaagctacctttgacatcatttcctctgcgaatgcatgtataatttctacagaacctattagaaaggatcacccagcctctgcttttgtacaactttcccttaaaaaactgccaattccactgctgtttggcccaatagtgagaactttttcctgctgcctcttggtgcttttgcctatggcccctattctgcctgctgaagacactcttgccagcatggacttaaacccctccagctctgacaatcctctttctcttttgttttacatgaagggtctggcagccaaagcaatcactcaaagttcaaaccttatcattttttgctttgttcctcttggccttggttttgtacatcagctttgaaaataccatcccagggttaatgctggggttaatttataactaagagtgctctagttttgcaatacaggacatgctataaaaatggaaagataccggtgccacaagaggtaagggtttaagggatggttggttggtggggtattaatgtttaattacctggagcacctgcctgaaatcactttttttcaggttggcatggccccaaagaagaagcggaaggtcggtatccacggagtcccagcagccgccaccagatccttcatcctgaagatcgagcccaacgaggaagtgaagaaaggcctctggaaaacccacgaggtgctgaaccacggaatcgcctactacatgaatatcctgaagctgatccggcaagaggccatctacgagcaccacgagcaggaccccaagaatcccaagaaggtgtccaaggccgagatccaggccgagctgtgggatttcgtgctgaagatgcagaagtgcaacagcttcacacacgaggtggacaaggacgaggtgttcaacatcctgagagagctgtacgaggaactggtgcccagcagcgtggaaaagaagggcgaagccaaccagctgagcaacaagtttctgtaccctctggtggaccccaacagccagtctggaaagggaacagccagcagcggcagaaagcccagatggtacaacctgaagattgccggcgatccctcctgggaagaagagaagaagaagtgggaagaagataagaaaaaggacccgctggccaagatcctgggcaagctggctgagtacggactgatccctctgttcatcccctacaccgacagcaacgagcccatcgtgaaagaaatcaagtggatggaaaagtcccggaaccagagcgtgcggcggctggataaggacatgttcattcaggccctggaacggttcctgagctgggagagctggaacctgaaagtgaaagaggaatacgagaaggtcgagaaagagtacaagaccctggaagagaggatcaaagaggacatccaggctctgaaggctctggaacagtatgagaaagagcggcaagaacagctgctgcgggacaccctgaacaccaacgagtaccggctgagcaagagaggccttagaggctggcgggaaatcatccagaaatggctgaaaatggacgagaacgagccctccgagaagtacctggaagtgttcaaggactaccagcggaagcaccctagagaggccggcgattacagcgtgtacgagttcctgtccaagaaagagaaccacttcatctggcggaatcaccctgagtacccctacctgtacgccaccttctgcgagatcgacaagaaaaagaaggacgccaagcagcaggccaccttcacactggccgatcctatcaatcaccctctgtgggtccgattcgaggaaagaagcggcagcaacctgaacaagtacagaatcctgaccgagcagctgcacaccgagaagctgaagaaaaagctgacagtgcagctggaccggctgatctaccctacagaatctggcggctgggaagagaagggcaaagtggacattgtgctgctgcccagccggcagttctacaaccagatcttcctggacatcgaggaaaagggcaagcacgccttcacctacaaggatgagagcatcaagttccctctgaagggcacactcggcggagccagagtgcagttcgacagagatcacctgagaagataccctcacaaggtggaaagcggcaacgtgggcagaatctacttcaacatgaccgtgaacatcgagcctacagagtccccagtgtccaagtctctgaagatccaccgggacgacttccccaaggtggtcaacttcaagcccaaagaactgaccgagtggatcaaggacagcaagggcaagaaactgaagtccggcatcgagtccctggaaatcggcctgagagtgatgagcatcgacctgggacagagacaggccgctgccgcctctattttcgaggtggtggatcagaagcccgacatcgaaggcaagctgtttttcccaatcaagggcaccgagctgtatgccgtgcacagagccagcttcaacatcaagctgcccggcgagacactggtcaagagcagagaagtgctgcggaaggccagagaggacaatctgaaactgatgaaccagaagctcaacttcctgcggaacgtgctgcacttccagcagttcgaggacatcaccgagagagagaagcgggtcaccaagtggatcagcagacaagagaacagcgacgtgcccctggtgtaccaggatgagctgatccagatccgcgagctgatgtacaagccttacaaggactgggtcgccttcctgaagcagctccacaagagactggaagtcgagatcggcaaagaagtgaagcactggcggaagtccctgagcgacggaagaaagggcctgtacggcatctccctgaagaacatcgacgagatcgatcggacccggaagttcctgctgagatggtccctgaggcctaccgaacctggcgaagtgcgtagactggaacccggccagagattcgccatcgaccagctgaatcacctgaacgccctgaaagaagatcggctgaagaagatggccaacaccatcatcatgcacgccctgggctactgctacgacgtgcggaagaagaaatggcaggctaagaaccccgcctgccagatcatcctgttcgaggatctgagcaactacaacccctacgaggaaaggtcccgcttcgagaacagcaagctcatgaagtggtccagacgcgagatccccagacaggttgcactgcagggcgagatctatggcctgcaagtgggagaagtgggcgctcagttcagcagcagattccacgccaagacaggcagccctggcatcagatgtagcgtcgtgaccaaagagaagctgcaggacaatcggttcttcaagaatctgcagagagagggcagactgaccctggacaaaatcgccgtgctgaaagagggcgatctgtacccagacaaaggcggcgagaagttcatcagcctgagcaaggatcggaagtgcgtgaccacacacgccgacatcaacgccgctcagaacctgcagaagcggttctggacaagaacccacggcttctacaaggtgtactgcaaggcctaccaggtggacggccagaccgtgtacatccctgagagcaaggaccagaagcagaagatcatcgaagagttcggcgagggctacttcattctgaaggacggggtgtacgaatgggtcaacgccggcaagctgaaaatcaagaagggcagctccaagcagagcagcagcgagctggtggatagcgacatcctgaaagacagcttcgacctggcctccgagctgaaaggcgaaaagctgatgctgtacagggaccccagcggcaatgtgttccccagcgacaaatggatggccgctggcgtgttcttcggaaagctggaacgcatcctgatcagcaagctgaccaaccagtactccatcagcaccatcgaggacgacagcagcaagcagtctatgaaaaggccggcggccacgaaaaaggccggccaggcaaaaaagaaaaagggatcctacccatacgatgttccagattacgcttatccctacgacgtgcctgattatgcatacccatatgatgtccccgactatgcctaagaattcctagagctcgctgatcagcctcgactgtgccttctagttgccagccatctgttgtttgcccctcccccgtgccttccttgaccctggaaggtgccactcccactgtcctttcctaataaaatgaggaaattgcatcgcattgtctgagtaggtgtcattctattctggggggtggggtggggcaggacagcaagggggaggattgggaagagaatagcaggcatgctggggacggccaaaaaaagagaccatatatggtctccgtgctaatgcctcgtaagagacatcgtccagcaataggagtttctcacaccctgcagcacttatagctagacggttgtcctgaccaaaagacagaaccggtgtttcgtcctttccacaagatatataaagccaagaaatcgaaatactttcaagttacggtaagcatatgatagtccattttaaaacataattttaaaactgcaaactacccaagaaattattactttctacgtcacgtattttgtactaatatctttgtgtttacagtcaaattaattccaattatctctctaacagccttgtatcgtatatgcaaatatgaaggaatcatgggaaataggccctcgcggccgcaggaacccctagtgatggagttggccactccctctctgcgcgctcgctcgctcactgaggccgggcgaccaaaggtcgcccgacgcccgggctttgcccgggcggcctcagtgagcgagcgagcgcgcagctgcctgcaggggcgcctgatgcggtattttctccttacgcatctgtgcggtatttcacaccgcatacgtcaaagcaaccatagtacgcgccctgtagcggcgcattaagcgcggcgggtgtggtggttacgcgcagcgtgaccgctacacttgccagcgccctagcgcccgctcctttcgctttcttcccttcctttctcgccacgttcgccggctttccccgtcaagctctaaatcgggggctccctttagggttccgatttagtgctttacggcacctcgaccccaaaaaacttgatttgggtgatggttcacgtagtgggccatcgccctgatagacggtttttcgccctttgacgttggagtccacgttctttaatagtggactcttgttccaaactggaacaacactcaaccctatctcgggctattcttttgatttataagggattttgccgatttcggcctattggttaaaaaatgagctgatttaacaaaaatttaacgcgaattttaacaaaatattaacgtttacaattttatggtgcactctcagtacaatctgctctgatgccgcatagttaagccagccccgacacccgccaacacccgctgacgcgccctgacgggcttgtctgctcccggcatccgcttacagacaagctgtgaccgtctccgggagctgcatgtgtcagaggttttcaccgtcatcaccgaaacgcgcgagacgaaagggcctcgtgatacgcctatttttataggttaatgtcatgataataatggtttcttagacgtcaggtggcacttttcggggaaatgtgcgcggaacccctatttgtttatttttctaaatacattcaaatatgtatccgctcatgagacaataaccctgataaatgcttcaataatattgaaaaaggaagagtatgagtattcaacatttccgtgtcgcccttattcccttttttgcggcattttgccttcctgtttttgctcacccagaaacgctggtgaaagtaaaagatgctgaagatcagttgggtgcacgagtgggttacatcgaactggatctcaacagcggtaagatccttgagagttttcgccccgaagaacgttttccaatgatgagcacttttaaagttctgctatgtggcgcggtattatcccgtattgacgccgggcaagagcaactcggtcgccgcatacactattctcagaatgacttggttgagtactcaccagtcacagaaaagcatcttacggatggcatgacagtaagagaattatgcagtgctgccataaccatgagtgataacactgcggccaacttacttctgacaacgatcggaggaccgaaggagctaaccgcttttttgcacaacatgggggatcatgtaactcgccttgatcgttgggaaccggagctgaatgaagccataccaaacgacgagcgtgacaccacgatgcctgtagcaatggcaacaacgttgcgcaaactattaactggcgaactacttactctagcttcccggcaacaattaatagactggatggaggcggataaagttgcaggaccacttctgcgctcggcccttccggctggctggtttattgctgataaatctggagccggtgagcgtggaagccgcggtatcattgcagcactggggccagatggtaagccctcccgtatcgtagttatctacacgacggggagtcaggcaactatggatgaacgaaatagacagatcgctgagataggtgcctcactgattaagcattggtaactgtcagaccaagtttactcatatatactttagattgatttaaaacttcatttttaatttaaaaggatctaggtgaagatcctttttgataatctcatgaccaaaatcccttaacgtgagttttcgttccactgagcgtcagaccccgtagaaaagatcaaaggatcttcttgagatcctttttttctgcgcgtaatctgctgcttgcaaacaaaaaaaccaccgctaccagcggtggtttgtttgccggatcaagagctaccaactctttttccgaaggtaactggcttcagcagagcgcagataccaaatactgtccttctagtgtagccgtagttaggccaccacttcaagaactctgtagcaccgcctacatacctcgctctgctaatcctgttaccagtggctgctgccagtggcgataagtcgtgtcttaccgggttggactcaagacgatagttaccggataaggcgcagcggtcgggctgaacggggggttcgtgcacacagcccagcttggagcgaacgacctacaccgaactgagatacctacagcgtgagctatgagaaagcgccacgcttcccgaagggagaaaggcggacaggtatccggtaagcggcagggtcggaacaggagagcgcacgagggagcttccagggggaaacgcctggtatctttatagtcctgtcgggtttcgccacctctgacttgagcgtcgatttttgtgatgctcgtcaggggggcggagcctatggaaaaacgccagcaacgcggcctttttacggttcctggccttttgctggccttttgctcacatgt

SEQ ID NO: 655 - DNA, 7495 bp, Artificial Sequence
  Synthetic Oligonucleotide
cctgcaggcagctgcgcgctcgctcgctcactgaggccgcccgggcgtcgggcgacctttggtcgcccggcctcagtgagcgagcgagcgcgcagagagggagtggccaactccatcactaggggttcctgcggcctctagactcgaggggctggaagctacctttgacatcatttcctctgcgaatgcatgtataatttctacagaacctattagaaaggatcacccagcctctgcttttgtacaactttcccttaaaaaactgccaattccactgctgtttggcccaatagtgagaactttttcctgctgcctcttggtgcttttgcctatggcccctattctgcctgctgaagacactcttgccagcatggacttaaacccctccagctctgacaatcctctttctcttttgttttacatgaagggtctggcagccaaagcaatcactcaaagttcaaaccttatcattttttgctttgttcctcttggccttggttttgtacatcagctttgaaaataccatcccagggttaatgctggggttaatttataactaagagtgctctagttttgcaatacaggacatgctataaaaatggaaagataccggtgccaccatggccccaaagaagaagcggaaggtcggtatccacggagtcccagcagccgccatccggtccatcaagctgaagatgaagaccaacagcggcaccgacagcatctacctgagaaaagccctgtggcggacccaccagctgatcaatgagggaatcgcctactacatgaacctgctgaccctgtaccggcaagaggccatcggcgacaagaccaaagaagcctatcaggccgagctgattaacatcatccggaaccagcagcggaacaacggcagctctgaggaacacggctccgaccaagaaattctggccctgctgagacagctgtacgagctgatcatccccagcagcatcggcgaatctggcgacgctaatcagctgggcaacaagtttctgtaccctctggtggaccccaacagccagtctggcaagggcacatctaacgccggcagaaagcccagatggaagcggctgaaagaggaaggcaaccccgactgggaactcgagaagaagaaggacgaggaacgcaaggccaaggatcccaccgtgaagatctttgacaacctgaacaaatacggcctgctgcctctgttcccactgttcaccaacatccagaaagacatcgagtggctgcccctgggcaagagacagtctgtgcggaagtgggacaaagacatgttcatccaggccatcgagagactgctgagctgggagagctggaacagaagagtggccgacgagtacaaacagctgaaagaaaagaccgagagctactacaaagagcacctgacaggcggcgaggaatggatcgagaagatccggaagttcgagaaagaacggaacatggaactggaaaagaacgccttcgctcccaacgacggctacttcatcaccagcagacagatcagaggctgggacagagtgtacgagaagtggtccaagctgcccgagtctgctagccctgaggaactgtggaaagtggtggccgagcagcagaacaagatgtccgaaggcttcggcgaccccaaggtgttcagcttcctggccaacagagagaaccgggacatttggagaggccacagcgagcggatctaccacattgccgcctacaacggcctgcagaagaagctgagccggaccaaagagcaggccaccttcacactgcctgacgccattgaacaccctctgtggatcagatacgagagccctggcggcaccaacctgaatctgttcaagctggaagagaaacagaaaaagaactactacgtgaccctgagcaagatcatctggcccagcgaggaaaagtggattgagaaagagaacatcgagatccctctggctcccagcatccagttcaaccggcagattaagctgaagcagcacgtgaagggcaagcaagagatcagcttcagcgactacagcagccggatcagcctggatggtgttctcggcggcagcagaatccagtttaatcggaagtacatcaagaaccacaaagagctgctcggagagggcgacatcggccccgtgttctttaacctggtggtggatgtggcccctctgcaagaaaccagaaacggcagactgcagagccccatcggcaaggccctgaaagtgatcagcagcgacttctccaaagtgatcgactacaagccgaaagaactcatggattggatgaataccggcagcgccagcaacagctttggagtggcttctctgctggaaggcatgagagtgatgagcatcgacatgggccagagaaccagcgcctccgtgtccatcttcgaggtcgtgaaagaactgcccaaggatcaagagcagaagctgttctacagcatcaacgacaccgagctgttcgccatccacaagcggagctttctgctgaacctgcctggcgaggtggtcaccaagaacaacaagcagcagcggcaagagcggcggaaaaagcggcagtttgtgcggagccagatcagaatgctggccaacgtgctgcggctggaaacaaagaaaacccctgacgagcggaagaaggccattcacaagctgatggaaatcgtgcagagctacgacagctggaccgccagccagaaagaagtgtgggagaaagagctgaatctcctgaccaacatggccgccttcaatgacgagatctggaaagaaagcctggtggaactgcaccaccggatcgagccttacgtgggacagatcgtgtccaagtggcggaagggcctgtctgagggcagaaagaatctggccggcatcagcatgtggaacatcgacgaactggaagataccaggcggctgctgatttcctggtccaagagaagcagaaccccaggcgaggccaacaggatcgaaaccgatgagcctttcggcagcagcctgctccagcacattcagaacgtgaaggacgacagactgaagcagatggccaacctgatcatcatgacagccctgggctttaagtacgacaaagaggaaaaggaccggtacaagcggtggaaagagacataccccgcctgccagatcatcctgttcgagaacctgaaccgctacctgttcaacctcgaccggtccagacgcgagaacagcagactgatgaagtgggcccatcggagcatccccagaaccgtgtctatgcagggcgagatgttcggcctgcaagtgggcgacgttcggagcgagtacagctccagattccacgccaaaacaggcgcccctggcatcagatgtcacgccctgactgaagaggatctgaaggccggcagcaacaccctgaagagactgatcgaggacggcttcatcaatgagagcgagctggcctacctgaagaagggcgatatcatccctagccaaggcggcgaactgttcgtgacactgtccaagcggtacaagaaggacagcgacaacaacgagctgaccgtgatccacgccgacatcaacgccgctcagaatctgcagaagcggttttggcagcaaaacagcgaggtgtacagagtgccctgtcagctggccagaatgggcgaagataagctgtacatccccaagagccagaccgagacaatcaagaagtatttcggcaagggctccttcgtgaagaacaataccgaacaagaggtctacaagtgggagaagtccgagaaaatgaagatcaagacggacaccaccttcgacctgcaagacctggatggcttcgaggacatcagcaagaccattgagctggcacaagagcagcaaaagaaatacctgaccatgttcagggaccccagcggctactttttcaacaatgagacatggcggcctcaaaaagaatactggtccatcgtgaacaacatcatcaagagctgcctcaagaagaagatcctgagcaacaaggtcgagctgaaaaggccggcggccacgaaaaaggccggccaggcaaaaaagaaaaagggatcctacccatacgatgttccagattacgcttatccctacgacgtgcctgattatgcatacccatatgatgtccccgactatgcctaagaattcctagagctcgctgatcagcctcgactgtgccttctagttgccagccatctgttgtttgcccctcccccgtgccttccttgaccctggaaggtgccactcccactgtcctttcctaataaaatgaggaaattgcatcgcattgtctgagtaggtgtcattctattctggggggtggggtggggcaggacagcaagggggaggattgggaagagaatagcaggcatgctggggacggccaaaaaaagagaccatatatggtctccgtgccaagcacctgttttcaggtgctcctgtggtgggtaatttttaattacttatggcacacgcacagattcattgaccctataggtccggtgtttcgtcctttccacaagatatataaagccaagaaatcgaaatactttcaagttacggtaagcatatgatagtccattttaaaacataattttaaaactgcaaactacccaagaaattattactttctacgtcacgtattttgtactaatatctttgtgtttacagtcaaattaattccaattatctctctaacagccttgtatcgtatatgcaaatatgaaggaatcatgggaaataggccctcgcggccgcaggaacccctagtgatggagttggccactccctctctgcgcgctcgctcgctcactgaggccgggcgaccaaaggtcgcccgacgcccgggctttgcccgggcggcctcagtgagcgagcgagcgcgcagctgcctgcaggggcgcctgatgcggtattttctccttacgcatctgtgcggtatttcacaccgcatacgtcaaagcaaccatagtacgcgccctgtagcggcgcattaagcgcggcgggtgtggtggttacgcgcagcgtgaccgctacacttgccagcgccctagcgcccgctcctttcgctttcttcccttcctttctcgccacgttcgccggctttccccgtcaagctctaaatcgggggctccctttagggttccgatttagtgctttacggcacctcgaccccaaaaaacttgatttgggtgatggttcacgtagtgggccatcgccctgatagacggtttttcgccctttgacgttggagtccacgttctttaatagtggactcttgttccaaactggaacaacactcaaccctatctcgggctattcttttgatttataagggattttgccgatttcggcctattggttaaaaaatgagctgatttaacaaaaatttaacgcgaattttaacaaaatattaacgtttacaattttatggtgcactctcagtacaatctgctctgatgccgcatagttaagccagccccgacacccgccaacacccgctgacgcgccctgacgggcttgtctgctcccggcatccgcttacagacaagctgtgaccgtctccgggagctgcatgtgtcagaggttttcaccgtcatcaccgaaacgcgcgagacgaaagggcctcgtgatacgcctatttttataggttaatgtcatgataataatggtttcttagacgtcaggtggcacttttcggggaaatgtgcgcggaacccctatttgtttatttttctaaatacattcaaatatgtatccgctcatgagacaataaccctgataaatgcttcaataatattgaaaaaggaagagtatgagtattcaacatttccgtgtcgcccttattcccttttttgcggcattttgccttcctgtttttgctcacccagaaacgctggtgaaagtaaaagatgctgaagatcagttgggtgcacgagtgggttacatcgaactggatctcaacagcggtaagatccttgagagttttcgccccgaagaacgttttccaatgatgagcacttttaaagttctgctatgtggcgcggtattatcccgtattgacgccgggcaagagcaactcggtcgccgcatacactattctcagaatgacttggttgagtactcaccagtcacagaaaagcatcttacggatggcatgacagtaagagaattatgcagtgctgccataaccatgagtgataacactgcggccaacttacttctgacaacgatcggaggaccgaaggagctaaccgcttttttgcacaacatgggggatcatgtaactcgccttgatcgttgggaaccggagctgaatgaagccataccaaacgacgagcgtgacaccacgatgcctgtagcaatggcaacaacgttgcgcaaactattaactggcgaactacttactctagcttcccggcaacaattaatagactggatggaggcggataaagttgcaggaccacttctgcgctcggcccttccggctggctggtttattgctgataaatctggagccggtgagcgtggaagccgcggtatcattgcagcactggggccagatggtaagccctcccgtatcgtagttatctacacgacggggagtcaggcaactatggatgaacgaaatagacagatcgctgagataggtgcctcactgattaagcattggtaactgtcagaccaagtttactcatatatactttagattgatttaaaacttcatttttaatttaaaaggatctaggtgaagatcctttttgataatctcatgaccaaaatcccttaacgtgagttttcgttccactgagcgtcagaccccgtagaaaagatcaaaggatcttcttgagatcctttttttctgcgcgtaatctgctgcttgcaaacaaaaaaaccaccgctaccagcggtggtttgtttgccggatcaagagctaccaactctttttccgaaggtaactggcttcagcagagcgcagataccaaatactgtccttctagtgtagccgtagttaggccaccacttcaagaactctgtagcaccgcctacatacctcgctctgctaatcctgttaccagtggctgctgccagtggcgataagtcgtgtcttaccgggttggactcaagacgatagttaccggataaggcgcagcggtcgggctgaacggggggttcgtgcacacagcccagcttggagcgaacgacctacaccgaactgagatacctacagcgtgagctatgagaaagcgccacgcttcccgaagggagaaaggcggacaggtatccggtaagcggcagggtcggaacaggagagcgcacgagggagcttccagggggaaacgcctggtatctttatagtcctgtcgggtttcgccacctctgacttgagcgtcgatttttgtgatgctcgtcaggggggcggagcctatggaaaaacgccagcaacgcggcctttttacggttcctggccttttgctggccttttgctcacatgt

SEQ ID NO: 656 - RNA, 14 nt, Artificial Sequence
  Synthetic Oligonucleotide
ccgcgaauggacac

SEQ ID NO: 657 - DNA, 25 bp, Artificial Sequence
  Synthetic Oligonucleotide
tagatgaattaaatgtgattagcac

SEQ ID NO: 658 - DNA, 25 bp, Artificial Sequence
  Synthetic Oligonucleotide
agcgagcggtctgagaagtggcact

SEQ ID NO: 659 - DNA, 23 bp, Artificial Sequence
  Synthetic Oligonucleotide
gcagaaataatgatgattggcac

SEQ ID NO: 660 - RNA, 36 nt, Artificial Sequence; identical to SEQ ID NO: 549
  Synthetic Oligonucleotide

SEQ ID NO: 661 - RNA, 21 nt, Artificial Sequence
  Synthetic Oligonucleotide
gggcgaucugagaaguggcac

SEQ ID NO: 662 - RNA, 20 nt, Artificial Sequence
  Synthetic Oligonucleotide
augauacgaggcauuagcac

SEQ ID NO: 663 - protein, 102 aa, Artificial Sequence
  Synthetic Peptide
SGVDDDMACHKIPVEADFLYAYSTAPGYYSWRNSKDGSWFIQSLCAMLKQYADKLEFMHILTRVNRKVATEFESFSFDATFHAKKQIPCIVSMLTKELYFYH
